(19) United States
(12) Patent Application Publication
(10) Pub. No.: US 2026/0132202 A1
(43) Pub. Date: May 14, 2026

(54) BISPECIFIC ANTIBODIES THAT BIND PD-L1 AND CD28

(71) Applicant: Xencor, Inc., Pasadena, CA (US)

(72) Inventors: John R. Desjarlais, Pasadena, CA (US); Gregory Moore, Azusa, CA (US); Michael Hedvat, Encino, CA (US); Juan Diaz, Anaheim Hills, CA (US); Veronica Gusti Zeng, Duarte, CA (US); Umesh S. Muchhal, Monrovia, CA (US)

(21) Appl. No.: 19/268,852

(22) Filed: Jul. 14, 2025

Related U.S. Application Data
(63) Continuation of application No. 17/501,846, filed on Oct. 14, 2021, now abandoned.
(60) Provisional application No. 63/091,806, filed on Oct. 14, 2020.
(60) Provisional application No. 63/110,916, filed on Nov. 6, 2020.
(60) Provisional application No. 63/173,242, filed on Apr. 9, 2021.

(51) Int. Cl. C07K 16/28; A61K 39/00

(52) U.S. Cl. CPC C07K 16/2818; C07K 16/2827; A61K 2039/505; C07K 2317/31; C07K 2317/622; C07K 2317/92

(57) ABSTRACT

Provided herein are novel αPD-L1 antibodies and methods of using such antibodies for the treatment of cancers. In some embodiments, the antibodies are αPD-L1×αCD28 bispecific antibodies. Such antibodies enhance anti-tumor activity by providing a costimulatory signal for T-cell activation against tumor cells while advantageously also blocking inhibitory PD-L1:PD-1 pathway interactions.

### PRIORITY

[0001] This application is a continuation of U.S. patent application Ser. No. 17/501,846, filed Oct. 14, 2021, which claims priority to U.S. Provisional Patent Application Nos. 63/091,806, filed Oct. 14, 2020, 63/110,916, filed Nov. 6, 2020, and 63/173,242, filed Apr. 9, 2021, which are hereby incorporated by reference in their entireties.

### SEQUENCE LISTING INCORPORATION PARAGRAPH

[0002] The instant application contains a Sequence Listing which has been submitted electronically in XML format and is hereby incorporated by reference in its entirety. Said XML copy, created on Jul. 14, 2025, is named 067461-5275-US01.xml and is 2,771,899 bytes in size.

### BACKGROUND

[0003] The natural immune response against tumor dispatches immune effector cells such as natural killer (NK) cells and T cells to attack and destroy tumor cells. Tumor infiltrating lymphocytes (TILs) often express multiple immune checkpoint receptors (e.g., PD-1, CTLA-4) and costimulatory receptors (e.g., ICOS, 4-1BB, OX40, GITR, and CD28). TILs lose their cytotoxic ability over time due to upregulation of inhibitory immune checkpoints. While checkpoint blockade has demonstrated increased clinical response rates relative to other treatment options, many patients still fail to achieve a response to checkpoint blockade. Engagement of costimulatory receptors on TILs could provide a positive signal capable of overcoming negative signals of immune checkpoints. Preclinical and clinical studies of agonistic costimulatory receptor antibodies have indeed demonstrated that agonism of costimulatory receptors can result in impressive anti-tumor responses, activating T cells to attack tumor cells.

[0004] It is also important for cancer therapy to enhance anti-tumor activity by specifically destroying tumor cells while minimizing peripheral toxicity. In this context, it is crucial that only T cells in the presence of the target tumor cells are provided a costimulatory signal. However, agonism of costimulatory receptors with monospecific full-length antibodies is likely nondiscriminatory with regards to TILs vs. peripheral T cells vs. autoantigen-reactive T cells that contribute to autoimmune toxicities. For instance, urelumab, a monospecific, nondiscriminatory, pan-4-1BB agonist antibody, exhibited significant liver toxicity in early phase clinical trials (Segal et al., 2016). Thus, there remains a need for novel immune response enhancing compositions for the treatment of cancers.

### SUMMARY

[0005] Provided herein are novel αPD-L1 antibodies. In some embodiments, the antibodies are αPD-L1×αCD28 bispecific antibodies. Such antibodies enhance anti-tumor activity by providing a costimulatory signal for T-cell activation against tumor cells while advantageously also blocking inhibitory PD-L1: PD1 pathway interactions (see FIG. 34). In some embodiments, such αPD-L1×αCD28 bispecific antibodies are useful for the treatment of cancers in conjunction with αCD3×αtumor target antigen (TTA) bispecific antibodies.

[0006] In a first aspect, provided herein is a heterodimeric antibody that comprises: a) a first monomer, b) a second monomer, and c) a light chain. The first monomer comprises: i) a scFv comprising a first variable heavy domain, an scFv linker and a first variable light domain; and ii) a first Fc domain, wherein the scFv is covalently attached to the N-terminus of the first Fc domain using a domain linker. The second monomer comprises, from N- to C-terminus, a VH1-CH1-hinge-CH2-CH3, wherein VH is a first variable heavy domain and CH2-CH3 is a second Fc domain. The light chain comprises, from N- to C-terminus, VL1-CL, wherein VL1 is a variable light domain and CL is a constant light domain. The VH1 and the VL1 form a first antigen binding domain (ABD). The scFv comprises a second VH domain (VH2), a scFv linker, and a second VL domain (VL2) and the VH2 and the VL2 form a second ABD. Further, one of the ABDs binds CD28 and the other binds PD-L1.

[0007] In some embodiments, the scFv comprises, from N- to C-terminus, VH2-scFv linker-VL2. In other embodiments, the scFv comprises, from N- to C-terminus, VL2-scFv linker-VH2.

[0008] In some embodiments, the first ABD binds PD-L1, wherein the amino acid sequence of the VH1 is selected from the group consisting of: SEQ ID NO:1079, SEQ ID NO:1042, SEQ ID NO:1055, SEQ ID NO:1059, SEQ ID NO:1063, SEQ ID NO: 1067, SEQ ID NO: 1071, SEQ ID NO: 1075, SEQ ID NO:1083, SEQ ID NO:1087, SEQ ID NO:1091, SEQ ID NO:1095, SEQ ID NO:1099, and SEQ ID NOs:736-797 or a variant thereof; and wherein the amino acid sequence of the VL1 is selected from the group consisting of: SEQ ID NO:1111, SEQ ID NO:1046, SEQ ID NO: 1103, SEQ ID NO: 1107, SEQ ID NO: 1115, SEQ ID NO: 1119, SEQ ID NO: 1123, SEQ ID NO: 1127, SEQ ID NO:1131, SEQ ID NO: 1135, SEQ ID NO: 1139, SEQ ID NO: 1143, SEQ ID NO: 1147, SEQ ID NO:1151, SEQ ID NO: 1155, and SEQ ID NOs:798-868 or a variant thereof.

[0009] In certain embodiments, the first ABD binds PD-L1, and the VH1 and VL1 are selected from the group consisting of: a VH1 having an amino acid sequence of SEQ ID NO:1183 and a VL1 having an amino acid sequence of SEQ ID NO:1187; a VH1 having an amino acid sequence of SEQ ID NO:1042 and a VL1 having an amino acid sequence of SEQ ID NO:1047; a VH1 having an amino acid sequence of SEQ ID NO:1159 and a VL1 having an amino acid sequence of SEQ ID NO: 1163; a VH1 having an amino acid sequence of SEQ ID NO: 1167 and a VL1 having an amino acid sequence of SEQ ID NO:1171; a VH1 having an amino acid sequence of SEQ ID NO: 1175 and a VL1 having an amino acid sequence of SEQ ID NO: 1179; a VH1 having an amino acid sequence of SEQ ID NO:1191 and a VL1 having an amino acid sequence of SEQ ID NO: 1195; a VH1 having an amino acid sequence of SEQ ID NO: 1199 and a VL1 having an amino acid sequence of SEQ ID NO:1203; a VH1 having an amino acid sequence of SEQ ID NO:1207 and a VL1 having an amino acid sequence of SEQ ID NO:1211; a VH1 having an amino acid sequence of SEQ ID NO:1215 and a VL1 having an amino acid sequence of SEQ ID NO:1219; a VH1 having an amino acid sequence of SEQ ID NO:1223 and a VL1 having an amino acid sequence of SEQ ID NO:1227; a VH1 having an amino acid sequence of SEQ ID NO:1231 and a VL1 having an amino acid sequence of SEQ ID NO:1235; a VH1 having an amino acid sequence of SEQ ID NO:1239 and a VL1 having an amino acid sequence of SEQ ID NO:1243; a VH1 having an amino acid sequence of SEQ ID NO:1247 and a VL1 having an amino acid sequence of SEQ ID NO:1251; a VH1 having an amino acid sequence of SEQ ID NO:1255 and a VL1 having an amino acid sequence of SEQ ID NO:1259; a VH1 having an amino acid sequence of SEQ ID NO:1263 and a VL1 having an amino acid sequence of SEQ ID NO:1267; a VH1 having an amino acid sequence of SEQ ID NO:1271 and a VL1 having an amino acid sequence of SEQ ID NO:1275; a VH1 having an amino acid sequence of SEQ ID NO:1279 and a VL1 having an amino acid sequence of SEQ ID NO:1283; a VH1 having an amino acid sequence of SEQ ID NO:1287 and a VL1 having an amino acid sequence of SEQ ID NO:1291; a VH1 having an amino acid sequence of SEQ ID NO:1295 and a VL1 having an amino acid sequence of SEQ ID NO:1299; and a VH1 having an amino acid sequence of SEQ ID NO:1303 and a VL1 having an amino acid sequence of SEQ ID NO:1307.

[0010] In exemplary embodiments, the second ABD binds to human CD28, wherein the amino acid sequence of the VH2 is selected from the group consisting of: SEQ ID NO:998, SEQ ID NO:984, SEQ ID NO:994 and SEQ ID NOs:561-629 or a variant thereof; and wherein the amino acid sequence of the VL2 is selected from the group consisting of: SEQ ID NO:1002, SEQ ID NO:984, and SEQ ID NOs:630-735 or a variant thereof.

[0011] In exemplary embodiments, the second ABD binds PD-L1, and the VH2 and VL2 are selected from the group consisting of: a VH2 having an amino acid sequence of SEQ ID NO:1030 and a VL2 having an amino acid sequence of SEQ ID NO:1034; a VH2 having an amino acid sequence of SEQ ID NO:1006 and a VL2 having an amino acid sequence of SEQ ID NO:1010; a VH2 having an amino acid sequence of SEQ ID NO:1014 and a VL2 having an amino acid sequence of SEQ ID NO:1018; and a VH2 having an amino acid sequence of SEQ ID NO:1022 and a VL2 having an amino acid sequence of SEQ ID NO:1026.

[0012] In some embodiments, the first Fc domain and second Fc domain are each variant Fc domains. In some embodiments, the first and second Fc domains comprise a set of heterodimerization skew variants selected from the following heterodimerization variants: S364K/E357Q: L368D/K370S; S364K: L368D/K370S; S364K: L368E/K370S; D401K: T411E/K360E/Q362E; and T366W: T366S/L368A/Y407V, wherein numbering is according to EU numbering. In exemplary embodiments, the first and second Fc domains comprise heterodimerization skew variants S364K/E357Q: L368D/K370S.

[0013] In some embodiments, the first and second Fc domains each comprise one or more ablation variants. In some embodiments, the one or more ablation variants are E233P/L234V/L235A/G236del/S267K, wherein numbering is according to EU numbering.

[0014] In some embodiments, one of the first or second monomer further comprises one or more pI variants. In exemplary embodiments, the CH1-hinge-CH2-CH3 of the second monomer comprises pI variants N208D/Q295E/N384D/Q418E/N421D, wherein numbering is according to EU numbering.

[0015] In certain embodiments, the CH1-hinge-CH2-CH3 of the second monomer comprises amino acid variants L368D/K370S/N208D/Q295E/N384D/Q418E/N421D/E233P/L234V/L235A/G236del/S267K, the first Fc domain comprises amino acid variants S364K/E357Q/E233P/L234V/L235A/G236del/S267K, and the numbering is according to EU numbering.

[0016] In some embodiments, the first and second Fc domains each comprise amino acid variants 428L/434S.

[0017] In one aspect, provided herein is heterodimeric antibody that comprises: a) a first monomer, b) a second monomer, and c) a light chain. The first monomer comprises from N- to C-terminus, VH1-CH1-first domain linker-scFv-second domain linker-CH2-CH3, wherein VH1 is a first variable heavy domain, and CH2-CH3 is a first Fc domain. The second monomer comprises from N- to C-terminus, a VH1-CH1-hinge-CH2-CH3, wherein CH2-CH3 is a second Fc domain. The light chain comprises from N- to C-terminus, VL1-CL, wherein VL1 is a variable light domain and CL is a constant light domain. Each of the VH1 domains and the first VL1 domain together form a first antigen binding domain (ABD). The scFv comprises a second VH domain (VH2), a scFv linker, and a second VL domain (VL2), and the VH2 and the VL2 form a second ABD. Further, one of the first and second ABDs bind human CD28 and the other of the first and second ABDs binds PD-L1.

[0018] In exemplary embodiments, the first ABDs bind human CD28 and the second ABD binds PD-L1. In some embodiments, the first ABDs bind PD-L1 and the second ABD binds human CD28.

[0019] In some embodiments, the scFv comprises, from N- to C-terminus, VL2-scFv linker-VH2. In other embodiments, the scFv comprises, from N- to C-terminus, VH2-scFv linker-VL2.

[0020] In some embodiments, the first ABDs bind PD-L1, wherein the amino acid sequence of the VH1 is selected from the group consisting of: SEQ ID NO:1079, SEQ ID NO:1042, SEQ ID NO:1055, SEQ ID NO:1059, SEQ ID NO:1063, SEQ ID NO: 1067, SEQ ID NO: 1071, SEQ ID NO: 1075, SEQ ID NO:1083, SEQ ID NO:1087, SEQ ID NO:1091, SEQ ID NO:1095, SEQ ID NO:1099, and SEQ ID NOs:736-797 or a variant thereof; and wherein the amino acid sequence of the VL1 is selected from the group consisting of: SEQ ID NO:1111, SEQ ID NO:1046, SEQ ID NO: 1103, SEQ ID NO: 1107, SEQ ID NO: 1115, SEQ ID NO: 1119, SEQ ID NO: 1123, SEQ ID NO: 1127, SEQ ID NO:1131, SEQ ID NO: 1135, SEQ ID NO: 1139, SEQ ID NO: 1143, SEQ ID NO: 1147, SEQ ID NO:1151, SEQ ID NO: 1155, and SEQ ID NOs:798-868 or a variant thereof.

[0021] In some embodiments, the first ABDs bind PD-L1, and the VH1 and VL1 are selected from the group consisting of: a VH1 having an amino acid sequence of SEQ ID NO:1183 and a VL1 having an amino acid sequence of SEQ ID NO:1187; a VH1 having an amino acid sequence of SEQ ID NO:1042 and a VL1 having an amino acid sequence of SEQ ID NO:1047; a VH1 having an amino acid sequence of SEQ ID NO:1159 and a VL1 having an amino acid sequence of SEQ ID NO: 1163; a VH1 having an amino acid sequence of SEQ ID NO: 1167 and a VL1 having an amino acid sequence of SEQ ID NO:1171; a VH1 having an amino acid sequence of SEQ ID NO: 1175 and a VL1 having an amino acid sequence of SEQ ID NO: 1179; a VH1 having an amino acid sequence of SEQ ID NO:1191 and a VL1 having an amino acid sequence of SEQ ID NO: 1195; a VH1 having an amino acid sequence of SEQ ID NO: 1199 and a VL1 having an amino acid sequence of SEQ ID NO:1203; a VH1 having an amino acid sequence of SEQ ID NO:1207 and a VL1 having an amino acid sequence of SEQ ID NO:1211; a VH1 having an amino acid sequence of SEQ ID NO:1215 and a VL1 having an amino acid sequence of SEQ ID NO:1219; a VH1 having an amino acid sequence of SEQ ID NO:1223 and a VL1 having an amino acid sequence of SEQ ID NO:1227; a VH1 having an amino acid sequence of SEQ ID NO:1231 and a VL1 having an amino acid sequence of SEQ ID NO:1235; a VH1 having an amino acid sequence of SEQ ID NO:1239 and a VL1 having an amino acid sequence of SEQ ID NO:1243; a VH1 having an amino acid sequence of SEQ ID NO:1247 and a VL1 having an amino acid sequence of SEQ ID NO:1251; a VH1 having an amino acid sequence of SEQ ID NO:1255 and a VL1 having an amino acid sequence of SEQ ID NO:1259; a VH1 having an amino acid sequence of SEQ ID NO:1263 and a VL1 having an amino acid sequence of SEQ ID NO:1267; a VH1 having an amino acid sequence of SEQ ID NO:1271 and a VL1 having an amino acid sequence of SEQ ID NO:1275; a VH1 having an amino acid sequence of SEQ ID NO:1279 and a VL1 having an amino acid sequence of SEQ ID NO:1283; a VH1 having an amino acid sequence of SEQ ID NO:1287 and a VL1 having an amino acid sequence of SEQ ID NO:1291; a VH1 having an amino acid sequence of SEQ ID NO:1295 and a VL1 having an amino acid sequence of SEQ ID NO:1299; and a VH1 having an amino acid sequence of SEQ ID NO:1303 and a VL1 having an amino acid sequence of SEQ ID NO:1307.

[0022] In some embodiments, the second ABD binds to human CD28, wherein the amino acid sequence of the VH2 is selected from the group consisting of: SEQ ID NO:998, SEQ ID NO:984, SEQ ID NO:994 and SEQ ID NOs:561-629 or a variant thereof; and wherein the amino acid sequence of the VL2 is selected from the group consisting of: SEQ ID NO:1002, SEQ ID NO:984, and SEQ ID NOs:630-735 or a variant thereof.

[0023] In some embodiments, the second ABD binds PD-L1, and the VH2 and VL2 are selected from the group consisting of: a VH2 having an amino acid sequence of SEQ ID NO:1030 and a VL2 having an amino acid sequence of SEQ ID NO:1034; a VH2 having an amino acid sequence of SEQ ID NO:1006 and a VL2 having an amino acid sequence of SEQ ID NO:1010; a VH2 having an amino acid sequence of SEQ ID NO:1014 and a VL2 having an amino acid sequence of SEQ ID NO:1018; and a VH2 having an amino acid sequence of SEQ ID NO:1022 and a VL2 having an amino acid sequence of SEQ ID NO:1026.

[0024] In some embodiments, the first Fc domain and second Fc domain are each variant Fc domains. In some embodiments, the first and second Fc domains comprise a set of heterodimerization skew variants selected from the following heterodimerization variants: S364K/E357Q: L368D/K370S; S364K: L368D/K370S; S364K: L368E/K370S; D401K: T411E/K360E/Q362E; and T366W: T366S/L368A/Y407V, wherein numbering is according to EU numbering. In exemplary embodiments, the first and second Fc domains comprise heterodimerization skew variants S364K/E357Q: L368D/K370S.

[0025] In some embodiments, the first and second Fc domains each comprise one or more ablation variants. In some embodiments, the one or more ablation variants are E233P/L234V/L235A/G236del/S267K, wherein numbering is according to EU numbering.

[0026] In some embodiments, one of the first or second monomer further comprises one or more pI variants. In exemplary embodiments, the CH1-hinge-CH2-CH3 of the second monomer comprises pI variants N208D/Q295E/N384D/Q418E/N421D, wherein numbering is according to EU numbering.

[0027] In some embodiments, the CH1-hinge-CH2-CH3 of the second monomer comprises amino acid variants L368D/K370S/N208D/Q295E/N384D/Q418E/N421D/E233P/L234V/L235A/G236del/S267K, the first Fc domain comprises amino acid variants S364K/E357Q/E233P/L234V/L235A/G236del/S267K, and numbering is according to EU numbering.

[0028] In some embodiments, the first and second Fc domains each comprise amino acid variants 428L/434S.

[0029] In one aspect, provided herein is heterodimeric antibody that comprises: a) a first monomer, b) a second monomer, and c) a light chain. The first monomer comprises from N-terminus to C-terminus, VH1-CH1-hinge-CH2-CH3-domain linker-scFv, wherein VH1 is a first variable heavy domain, and CH2-CH3 is a first Fc domain. The second monomer comprises from N-terminus to C-terminus a VH1-CH1-hinge-CH2-CH3, wherein CH2-CH3 is a second Fc domain. The light chain comprises, from N-terminus to C-terminus, VL1-CL, wherein VL1 is a variable light domain and CL is a constant light domain. Each of the VH1 domain and the first VL1 domain together form a first antigen binding domain (ABD). The scFv comprises a second VH domain (VH2), a scFv linker, and a second VL domain (VL2), and the VH2 and the VL2 together form a second ABD. Further, one of the first and second ABDs bind human CD28 and the other of the first and second ABDs bind PD-L1.

[0030] In exemplary embodiments, the first ABDs bind human CD28 and the second ABD binds PD-L1. In some embodiments, the first ABDs bind PD-L1 and the second ABD binds human CD28.

[0031] In some embodiments, the scFv comprises, from N- to C-terminus, VL2-scFv linker-VH2. In exemplary embodiments, the scFv comprises, from N- to C-terminus, VH2-scFv linker-VL2.

[0032] In some embodiments, the first ABDs bind PD-L1, wherein the amino acid sequence of the VH1 is selected from the group consisting of: SEQ ID NO:1079, SEQ ID NO:1042, SEQ ID NO:1055, SEQ ID NO:1059, SEQ ID NO:1063, SEQ ID NO: 1067, SEQ ID NO: 1071, SEQ ID NO: 1075, SEQ ID NO:1083, SEQ ID NO:1087, SEQ ID NO:1091, SEQ ID NO:1095, SEQ ID NO:1099, and SEQ ID NOs:736-797 or a variant thereof; and wherein the amino acid sequence of the VL1 is selected from the group consisting of: SEQ ID NO:1111, SEQ ID NO:1046, SEQ ID NO: 1103, SEQ ID NO: 1107, SEQ ID NO: 1115, SEQ ID NO: 1119, SEQ ID NO: 1123, SEQ ID NO: 1127, SEQ ID NO:1131, SEQ ID NO: 1135, SEQ ID NO: 1139, SEQ ID NO: 1143, SEQ ID NO: 1147, SEQ ID NO:1151, SEQ ID NO: 1155, and SEQ ID NOs:798-868 or a variant thereof.

[0033] In some embodiments, the first ABDs bind PD-L1, and the VH1 and VL1 are selected from the group consisting of: a VH1 having an amino acid sequence of SEQ ID NO:1183 and a VL1 having an amino acid sequence of SEQ ID NO:1187; a VH1 having an amino acid sequence of SEQ ID NO:1042 and a VL1 having an amino acid sequence of SEQ ID NO:1047; a VH1 having an amino acid sequence of SEQ ID NO:1159 and a VL1 having an amino acid sequence of SEQ ID NO: 1163; a VH1 having an amino acid sequence of SEQ ID NO: 1167 and a VL1 having an amino acid sequence of SEQ ID NO:1171; a VH1 having an amino acid sequence of SEQ ID NO: 1175 and a VL1 having an amino acid sequence of SEQ ID NO: 1179; a VH1 having an amino acid sequence of SEQ ID NO:1191 and a VL1 having an amino acid sequence of SEQ ID NO: 1195; a VH1 having an amino acid sequence of SEQ ID NO: 1199 and a VL1 having an amino acid sequence of SEQ ID NO:1203; a VH1 having an amino acid sequence of SEQ ID NO:1207 and a VL1 having an amino acid sequence of SEQ ID NO:1211; a VH1 having an amino acid sequence of SEQ ID NO:1215 and a VL1 having an amino acid sequence of SEQ ID NO:1219; a VH1 having an amino acid sequence of SEQ ID NO:1223 and a VL1 having an amino acid sequence of SEQ ID NO:1227; a VH1 having an amino acid sequence of SEQ ID NO:1231 and a VL1 having an amino acid sequence of SEQ ID NO:1235; a VH1 having an amino acid sequence of SEQ ID NO:1239 and a VL1 having an amino acid sequence of SEQ ID NO:1243; a VH1 having an amino acid sequence of SEQ ID NO:1247 and a VL1 having an amino acid sequence of SEQ ID NO:1251; a VH1 having an amino acid sequence of SEQ ID NO:1255 and a VL1 having an amino acid sequence of SEQ ID NO:1259; a VH1 having an amino acid sequence of SEQ ID NO:1263 and a VL1 having an amino acid sequence of SEQ ID NO:1267; a VH1 having an amino acid sequence of SEQ ID NO:1271 and a VL1 having an amino acid sequence of SEQ ID NO:1275; a VH1 having an amino acid sequence of SEQ ID NO:1279 and a VL1 having an amino acid sequence of SEQ ID NO:1283; a VH1 having an amino acid sequence of SEQ ID NO:1287 and a VL1 having an amino acid sequence of SEQ ID NO:1291; a VH1 having an amino acid sequence of SEQ ID NO:1295 and a VL1 having an amino acid sequence of SEQ ID NO:1299; and a VH1 having an amino acid sequence of SEQ ID NO:1303 and a VL1 having an amino acid sequence of SEQ ID NO:1307.

[0034] In some embodiments, the second ABD binds to human CD28, wherein the amino acid sequence of the VH2 is selected from the group consisting of: SEQ ID NO:998, SEQ ID NO:984, SEQ ID NO:994 and SEQ ID NOs:561-629 or a variant thereof; and wherein the amino acid sequence of the VL2 is selected from the group consisting of: SEQ ID NO:1002, SEQ ID NO:984, and SEQ ID NOs:630-735 or a variant thereof.

[0035] In exemplary embodiments, the second ABD binds PD-L1, and the VH2 and VL2 are selected from the group consisting of: a VH1 having an amino acid sequence of SEQ ID NO:1030 and a VL2 having an amino acid sequence of SEQ ID NO:1034; a VH1 having an amino acid sequence of SEQ ID NO:1006 and a VL2 having an amino acid sequence of SEQ ID NO:1010; a VH2 having an amino acid sequence of SEQ ID NO:1014 and a VL2 having an amino acid sequence of SEQ ID NO:1018; and a VH2 having an amino acid sequence of SEQ ID NO:1022 and a VL2 having an amino acid sequence of SEQ ID NO:1026.

[0036] In some embodiments, the first Fc domain and second Fc domain are each variant Fc domains. In some embodiments, the first and second Fc domains comprise a set of heterodimerization skew variants selected from the following heterodimerization variants: S364K/E357Q: L368D/K370S; S364K: L368D/K370S; S364K: L368E/K370S; D401K: T411E/K360E/Q362E; and T366W: T366S/L368A/Y407V, wherein numbering is according to EU numbering. In exemplary embodiments, the first and second Fc domains comprise heterodimerization skew variants S364K/E357Q: L368D/K370S.

[0037] In some embodiments, the first and second Fc domains each comprise one or more ablation variants. In some embodiments, the one or more ablation variants are E233P/L234V/L235A/G236del/S267K, wherein numbering is according to EU numbering.

[0038] In some embodiments, one of the first or second monomer further comprises one or more pI variants. In exemplary embodiments, the CH1-hinge-CH2-CH3 of the second monomer comprises pI variants N208D/Q295E/N384D/Q418E/N421D, wherein numbering is according to EU numbering.

[0039] In some embodiments, the CH1-hinge-CH2-CH3 of the second monomer comprises amino acid variants L368D/K370S/N208D/Q295E/N384D/Q418E/N421D/E233P/L234V/L235A/G236del/S267K, the first Fc domain comprises amino acid variants S364K/E357Q/E233P/L234V/L235A/G236del/S267K, and numbering is according to EU numbering.

[0040] In some embodiments, the first and second Fc domains each comprise amino acid variants 428L/434S.

[0041] In one aspect, provided herein is composition comprising an anti-PD-L1 Antigen Binding Domain (ABD) comprising: a variable heavy domain (VH) with an amino acid sequence selected from the group consisting of: SEQ ID NO:1079, SEQ ID NO:1042, SEQ ID NO:1055, SEQ ID NO:1059, SEQ ID NO:1063, SEQ ID NO: 1067, SEQ ID NO: 1071, SEQ ID NO: 1075, SEQ ID NO:1083, SEQ ID NO:1087, SEQ ID NO:1091, SEQ ID NO:1095, SEQ ID NO:1099, and SEQ ID NOs:736-797 or a variant thereof; and variable light domain (VL) with an amino acid sequence selected from the group consisting of: SEQ ID NO:1111, SEQ ID NO:1046, SEQ ID NO: 1103, SEQ ID NO: 1107, SEQ ID NO: 1115, SEQ ID NO: 1119, SEQ ID NO: 1123, SEQ ID NO: 1127, SEQ ID NO:1131, SEQ ID NO: 1135, SEQ ID NO: 1139, SEQ ID NO: 1143, SEQ ID NO: 1147, SEQ ID NO:1151, SEQ ID NO: 1155, and SEQ ID NOs:798-868 or a variant thereof.

[0042] In another aspect, provided herein is a composition comprising an anti-PD-L1 Antigen Binding Domain (ABD) comprising a variable heavy domain (VH) and a variable light domain (VL) selected from the group consisting of: a VH having an amino acid sequence of SEQ ID NO:1183 and a VL having an amino acid sequence of SEQ ID NO:1187; a VH having an amino acid sequence of SEQ ID NO:1042 and a VL having an amino acid sequence of SEQ ID NO:1047; a VH having an amino acid sequence of SEQ ID NO: 1159 and a VL having an amino acid sequence of SEQ ID NO:1163; a VH having an amino acid sequence of SEQ ID NO:1167 and a VL having an amino acid sequence of SEQ ID NO:1171; a VH having an amino acid sequence of SEQ ID NO:1175 and a VL having an amino acid sequence of SEQ ID NO:1179; a VH having an amino acid sequence of SEQ ID NO:1191 and a VL having an amino acid sequence of SEQ ID NO: 1195; a VH having an amino acid sequence of SEQ ID NO: 1199 and a VL having an amino acid sequence of SEQ ID NO:1203; a VH having an amino acid sequence of SEQ ID NO:1207 and a VL having an amino acid sequence of SEQ ID NO:1211; a VH having an amino acid sequence of SEQ ID NO:1215 and a VL having an amino acid sequence of SEQ ID NO:1219; a VH having an amino acid sequence of SEQ ID NO:1223 and a VL having an amino acid sequence of SEQ ID NO:1227; a VH having an amino acid sequence of SEQ ID NO:1231 and a VL having an amino acid sequence of SEQ ID NO:1235; a VH having an amino acid sequence of SEQ ID NO:1239 and a VL having an amino acid sequence of SEQ ID NO:1243; a VH having an amino acid sequence of SEQ ID NO:1247 and a VL having an amino acid sequence of SEQ ID NO:1251; a VH having an amino acid sequence of SEQ ID NO:1255 and a VL having an amino acid sequence of SEQ ID NO:1259; a VH having an amino acid sequence of SEQ ID NO:1263 and a VL having an amino acid sequence of SEQ ID NO:1267; a VH having an amino acid sequence of SEQ ID NO:1271 and a VL having an amino acid sequence of SEQ ID NO:1275; a VH having an amino acid sequence of SEQ ID NO:1279 and a VL having an amino acid sequence of SEQ ID NO:1283; a VH having an amino acid sequence of SEQ ID NO:1287 and a VL having an amino acid sequence of SEQ ID NO:1291; a VH having an amino acid sequence of SEQ ID NO:1295 and a VL having an amino acid sequence of SEQ ID NO:1299; and a VH having an amino acid sequence of SEQ ID NO:1303 and a VL having an amino acid sequence of SEQ ID NO:1307.

[0043] In one aspect, provided herein is a composition comprising an anti-PD-L1 Antigen Binding Domain (ABD) comprising a variable heavy domain having an amino acid sequence of SEQ ID NO:1183 and a variable light domain having an amino acid sequence of SEQ ID NO: 1187.

[0044] In one aspect, provided herein is a composition comprising an anti-PD-L1 Antigen Binding Domain (ABD) comprising a variable heavy domain having an amino acid sequence of SEQ ID NO:1042 and a variable light domain having an amino acid sequence of SEQ ID NO:1047.

[0045] In one aspect, provided herein is a composition comprising an anti-PD-L1 Antigen Binding Domain (ABD) comprising a variable heavy domain having an amino acid sequence of SEQ ID NO:1159 and a variable light domain having an amino acid sequence of SEQ ID NO: 1163.

[0046] In some embodiments, the composition is an antibody comprising: a) a heavy chain comprising, from N- to C-terminus: VH-CH1-hinge-CH2-CH3, wherein VH is the variable heavy domain and CH1-hinge-CH2-CH3 is heavy chain constant domain; and b) a light chain comprising from N-to C-terminus: VL-CL, wherein VL is the variable light domain and CL is a light chain constant domain.

[0047] Also provided herein are nucleic acid compositions encoding the compositions and antibodies provided herein, expression vectors that include such nucleic acids, and host cells that include the nucleic acids and expression vectors.

[0048] In another aspect, provided herein is a method of treating a cancer that includes administering to a patient in need thereof one of the subject antibodies provided herein. In some embodiments, the method further includes administering an anti-CD3×tumor target antigen bispecific antibody to the patient.

### BRIEF DESCRIPTION OF THE DRAWINGS

[0049] FIGS. 1A and 1B depict the sequences for human, mouse, and cynomolgus CD28. Such CD28 are useful for the development of cross-reactive CD28 antigen binding domains for ease of clinical development.

[0050] FIG. 2 depicts the sequences for human, mouse, and cynomolgus PD-L1. Such PD-L1 are useful for the development of cross-reactive CD28 antigen binding domains for ease of clinical development.

[0051] FIG. 3A-3F depict useful pairs of heterodimerization variant sets (including skew and pI variants). In FIG. 3F, there are variants for which there are no corresponding “monomer 2” variants. Such variants are pI variants that can be used alone on either monomer of a bispecific antibody (e.g., αPD-L1×αCD28 bsAb), or included, for example, on the non-scFv side of a format that utilizes an scFv as a component and an appropriate charged scFv linker can be used on the second monomer that utilizes an scFv as the CD28 binding domain. Suitable charged linkers are shown in FIG. 6.

[0052] FIG. 4 depicts a list of isosteric variant antibody constant regions and their respective substitutions. pI_(−) indicates lower pI variants, while pI_(+) indicates higher pI variants. These variants can be optionally and independently combined with other variants, including heterodimerization variants, outlined herein.

[0053] FIG. 5 depict useful ablation variants that ablate FcγR binding (also referred to as “knockouts” or “KO” variants). In some embodiments, such ablation variants are included in the Fc domain of both monomers of the subject antibody described herein. In other embodiments, the ablation variants are only included on only one variant Fc domain.

[0054] FIG. 6 depicts a number of charged scFv linkers that find use in increasing or decreasing the pI of the subject heterodimeric bispecific antibodies that utilize one or more scFv as a component, as described herein (e.g., α PD-L1×αCD28 bsAbs). The (+H) positive linker finds particular use herein, particularly with anti-CD28 VL and VH sequences shown herein. A single prior art scFv linker with a single charge is referenced as “Whitlow,” from Whitlow et al., Protein Engineering 6(8):989-995 (1993). It should be noted that this linker was used for reducing aggregation and enhancing proteolytic stability in scFvs. Such charged scFv linkers can be used in any of the subject antibody formats disclosed herein that include scFvs (e.g., 1+1 Fab-scFv-Fc and 2+1 Fab2-scFv-Fc formats).

[0055] FIG. 7 depicts a number of exemplary domain linkers. In some embodiments, these linkers find use linking a single-chain Fv to an Fc chain. In some embodiments, these linkers may be combined in any orientation. For example, a GGGGS linker may be combined with a “lower half hinge” linker at the N-terminus or at the C-terminus.

[0056] FIG. 8 shows a particularly useful embodiment of the heterodimeric Fc domains (i.e. CH2-CH3 in this embodiment) of the anti-CD28×anti-PD-L1 bsAbs of the invention

[0057] FIG. 9 depicts various heterodimeric skew variant amino acid substitutions that can be used with the heterodimeric antibodies described herein.

[0058] FIGS. 10A-10C show the sequences of several useful heterodimeric αB7-H3×αCD28 bsAb backbones based on human IgG1, without the cytokine sequences. Heterodimeric Fc backbone 1 is based on human IgG1 (356E/358M allotype), and includes the L368D/K370S skew variants and the Q295E/N384D/Q418E/N421D pI variants on a first heterodimeric Fc chain, the S364K/E357Q skew variants on a second heterodimeric Fc chain, and the E233P/L234V/L235A/G236del/S267K ablation variants on both chains. Heterodimeric Fc backbone 2 is based on human IgG1 (356E/358M allotype), and includes the L368D/K370S skew variants and the Q295E/N384D/Q418E/N421D pI variants on a first heterodimeric Fc chain, the S364K skew variant on a second heterodimeric Fc chain, and the E233P/L234V/L235A/G236del/S267K ablation variants on both chains. Heterodimeric Fc backbone 3 is based on human IgG1 (356E/358M allotype), and includes the L368E/K370S skew variants and the Q295E/N384D/Q418E/N421D pI variants on a first heterodimeric Fc chain, the S364K skew variant on a second heterodimeric Fc chain, and the E233P/L234V/L235A/G236del/S267K ablation variants on both chains. Heterodimeric Fc backbone 4 is based on human IgG1 (356E/358M allotype), and includes the K360E/Q362E/T411E skew variants and the Q295E/N384D/Q418E/N421D pI variants on a first heterodimeric Fc chain, the D401K skew variant on a second heterodimeric Fc chain, and the E233P/L234V/L235A/G236del/S267K ablation variants on both chains. Heterodimeric Fc backbone 5 is based on human IgG1 (356D/358L allotype), and includes the L368D/K370S skew variants and the Q295E/N384D/Q418E/N421D pI variants on a first heterodimeric Fc chain, the S364K/E357Q skew variants on a second heterodimeric Fc chain, and the E233P/L234V/L235A/G236del/S267K ablation variants on both chains. Heterodimeric Fc backbone 6 is based on human IgG1 (356E/358M allotype), and includes the L368D/K370S skew variants and the Q295E/N384D/Q418E/N421D pI variants on a first heterodimeric Fc chain, the S364K/E357Q skew variants on a second heterodimeric Fc chain, and the E233P/L234V/L235A/G236del/S267K ablation variants and N297A variant that removes glycosylation on both chains. Heterodimeric Fc backbone 7 is based on human IgG1 (356E/358M allotype), and includes the L368D/K370S skew variants and the Q295E/N384D/Q418E/N421D pI variants on a first heterodimeric Fc chain, the S364K/E357Q skew variants on a second heterodimeric Fc chain, and the E233P/L234V/L235A/G236del/S267K ablation variants and N297S variant that removes glycosylation on both chains. Heterodimeric Fc backbone 8 is based on human IgG4, and includes the L368D/K370S skew variants and the Q295E/N384D/Q418E/N421D pI variants on a first heterodimeric Fc chain, the S364K/E357Q skew variants on a second heterodimeric Fc chain, and the S228P (according to EU numbering, S241P in Kabat) variant that ablates Fab arm exchange (as is known in the art) on both chains. Heterodimeric Fc backbone 9 is based on human IgG2, and includes the L368D/K370S skew variants and the Q295E/N384D/Q418E/N421D pI variants on a first heterodimeric Fc chain, the S364K/E357Q skew variants on a second heterodimeric Fc chain. Heterodimeric Fc backbone 10 is based on human IgG2, and includes the L368D/K370S skew variants and the Q295E/N384D/Q418E/N421D pI variants on a first heterodimeric Fc chain, the S364K/E357Q skew variants on a second heterodimeric Fc chain, and the S267K ablation variant on both chains. Heterodimeric Fc backbone 11 is based on human IgG1 (356E/358M allotype), and includes the L368D/K370S skew variants and the Q295E/N384D/Q418E/N421D pI variants on a first heterodimeric Fc chain, the S364K/E357Q skew variants on a second heterodimeric Fc chain, and the E233P/L234V/L235A/G236del/S267K ablation variants and M428L/N434S Xtend variants on both chains. Heterodimeric Fc backbone 12 is based on human IgG1 (356E/358M allotype), and includes the L368D/K370S skew variants on a first heterodimeric Fc chain, the S364K/E357Q skew variants and P217R/P229R/N276K pI variants on a second heterodimeric Fc chain, and the E233P/L234V/L235A/G236del/S267K ablation variants on both chains.

[0059] Included within each of these backbones are sequences that are 90, 95, 98 and 99% identical (as defined herein) to the recited sequences, and/or contain from 1, 2, 3, 4, 5, 6, 7, 8, 9 or 10 additional amino acid substitutions (as compared to the “parent” of the Figure, which, as will be appreciated by those in the art, already contain a number of amino acid modifications as compared to the parental human IgG1 (or IgG2 or IgG4, depending on the backbone). That is, the recited backbones may contain additional amino acid modifications (generally amino acid substitutions) in addition or as an alternative to the skew, pI and ablation variants contained within the backbones of this Figure. Additionally, the backbones depicted herein may include deletion of the C-terminal glycine (K446_) and/or lysine (K447_). The C-terminal glycine and/or lysine deletion may be intentionally engineered to reduce heterogeneity or in the context of certain bispecific formats, such as the mAb-scFv format. Additionally, C-terminal glycine and/or lysine deletion may occur naturally for example during production and storage.

[0060] FIG. 11 depicts illustrative sequences of heterodimeric B7H3×CD28 bsAb backbone for use in the 2+1 mAb-scFv format. The format depicted here is based on heterodimeric Fc backbone 1 as depicted in Figure X, except further including G446_on monomer 1 (−) and G446_/K447_on monomer 2 (+). It should be noted that any of the additional backbones depicted in Figure X may be adapted for use in the 2+1 mAb-scFv format with or without including K447_on one or both chains. It should be noted that these sequences may further include the M428L/N434S variants.

[0061] FIG. 12 depicts sequences for “CH1+hinge” that find use in embodiments of α PD-L1×αCD28 bsAbs that utilize a Fab binding domain. The “CH1+hinge” sequences find use linking the variable heavy domain (VH) to the Fc backbones (as depicted in FIG. 10). For particular embodiments wherein the Fab is on the (+) side, the “CH1(+)+hinge” sequences may find use. For particular embodiments wherein the Fab is on the (−) side, the “CH1(−)+hinge” sequences may find use.

[0062] FIG. 13 depicts sequences for “CH1+half hinge” domain linker that find use in embodiments of α PD-L1×αCD28 bsAbs in the 2+1 Fab2-scFv-Fc format or 2+1 CLC format. In the 2+1 Fab2-scFv-Fc format, the “CH1+half hinge” sequences find use linking the variable heavy domain (VH) to the scFv domain on the Fab-scFv-Fc side of the bispecific antibody. In the 2+1 CLC format, the “CH1+half hinge” sequences find use linking the first variable heavy domain (VH) to the second VH domain on the Fab-Fab-Fc side of the bispecific antibody. It should be noted that other linkers may be used in place of the “CH1+half hinge”. It should also be noted that although the sequences here are based on the IgG1 sequence, equivalents can be constructed based on the IgG2 or IgG4 sequences.

[0063] FIG. 14 depicts sequences for “CH1” that find use in embodiments of αPDL1×αCD28 bsAbs.

[0064] FIG. 15 depicts sequences for “hinge” that find use in embodiments of αPDL1×αCD28 bsAbs.

[0065] FIG. 16 depicts the constant domain of the cognate light chains that find use in the subject αPD-L1×αCD28 bsAbs that utilize a Fab binding domain.

[0066] FIG. 17 depicts the sequences for XENP16432, an anti-PD-1 mAb based on nivolumab and IgG1 backbone with E233P/L234V/L235A/G236del/S267K ablation variant. CDRs are underlined and slashes indicate the border(s) between the variable regions and constant domain.

[0067] FIG. 18 depicts the variable heavy and variable light chain sequences for 1A7, an exemplary phage-derived CD28 binding domain, as well as the sequences for XENP28428, an anti-CD28 mAb based on 1A7 and IgG1 backbone with E233P/L234V/L235A/G236del/S267K ablation variant. CDRs are underlined and slashes indicate the border(s) between the variable regions and constant domain. As noted herein and is true for every sequence herein containing CDRs, the exact identification of the CDR locations may be slightly different depending on the numbering used as is shown in Table 2, and thus included herein are not only the CDRs that are underlined but also CDRs included within the VH and VL domains using other numbering systems. Furthermore, as for all the sequences in the Figures, these VH and VL sequences can be used either in a scFv format or in a Fab format.

[0068] FIG. 19 depicts the sequences for affinity-optimized variable heavy domains from anti-CD28 clone 1A7. It should be noted that the variable heavy domains can be paired with any of the other variable light domains depicted herein including SEQ ID NO: 1002 (e.g. 1A7_H1.1_L1.71 as utilized in XENP37559).

[0069] FIG. 20 depicts the sequences for affinity-optimized variable light domain from anti-CD28 clone 1A7. It should be noted that the variable light domains can be paired with any of the other variable heavy domains depicted herein including SEQ ID NOs: 999 and 998 (e.g. 1A7_H1.1_L1.71 as utilized in XENP37559).

[0070] FIGS. 21A and 21B depict the sequence for illustrative affinity-optimized 1A7 VH/VH pairs. It should be noted that these pairs may be formatted as Fabs or as scFvs.

[0071] FIG. 22 depicts illustrative affinity-engineered 1A7 VH/VL pairs and their binding affinities in the context of scFvs (in the context of 1+1 Fab-scFv-Fc bsAb format).

[0072] FIG. 23 depicts the sequences for XENP27181, a bivalent anti-CD28 mAb based on HuTN228 binding domain and IgG1 backbone with E233P/L234V/L235A/G236del/S267K ablation variant; and XENP27656, a monovalent anti-CD28 mAb based on HuTN228 binding domain (formatted as an scFv) and IgG1 backbone with E233P/L234V/L235A/G236del/S267K ablation variant. CDRs are underlined and slashes indicate the border(s) between the variable regions and constant domain. As noted herein and is true for every sequence herein containing CDRs, the exact identification of the CDR locations may be slightly different depending on the numbering used as is shown in Table 2, and thus included herein are not only the CDRs that are underlined but also CDRs included within the VH and VL domains using other numbering systems. Furthermore, as for all the sequences in the Figures, these VH and VL sequences can be used either in a scFv format or in a Fab format.

[0073] FIG. 24 depicts KDapp (KD apparent due to bivalent binding) of various CD28 binding phage clones (formatted as bivalent mAbs) for human CD28 as determined by Octet. First 60 seconds of dissociation was used for data fit.

[0074] FIG. 25 depicts binding of illustrative bivalent anti-CD28 mAbs based on phage-derived clones on human PBMCs. The data show that the phage campaign generated CD28 binding domains having weaker maximum binding than prior art HuTN228 (which is related to the humanized CD28 binding domains described in Example 1A).

[0075] FIGS. 26A-26E depicts a couple of formats of the present invention. FIG. 26A depicts the “1+1 Fab-scFv-Fc” format, with a first Fab arm binding a first antigen and a second scFv arm binding second antigen. The 1+1 Fab-scFv-Fc format comprises a first monomer comprising a first heavy chain variable region (VH1) covalently attached to the N-terminus of a first heterodimeric Fc backbone (optionally via a linker), a second monomer comprising a single-chain Fv covalently attached to the N-terminus of a second corresponding heterodimeric Fc backbone (optionally via a linker), and a third monomer comprising a light chain variable region covalently to a light chain constant domain, wherein the light chain variable region is complementary to the VH1. FIG. 26B depicts the “2+1 Fab2-scFv-Fc” format, with a first Fab arm and a second Fab-scFv arm, wherein the Fab binds a first antigen and the scFv binds second antigen. The 2+1 Fab2-scFv-Fc format comprises a first monomer comprising a first heavy chain variable region (VH1) covalently attached to the N-terminus of a first heterodimeric Fc backbone (optionally via a linker), a second monomer comprising the VH1 covalently attached (optionally via a linker) to a single-chain Fv covalently attached (optionally via a linker) to the N-terminus of a second corresponding heterodimeric Fc backbone, and a third monomer comprising a light chain variable region covalently to a light chain constant domain, wherein the light chain variable region is complementary to the VH1. FIG. 26C depicts the “1+1 Common Light Chain” or “1+1 CLC” format, with a first Fc comprising a first Fab arm binding a first antigen and a second Fc comprising a second Fab arm binding second antigen. The 1+1 CLC format comprises a first monomer comprising VH1-CH1-hinge-CH2-CH3, a second monomer comprising VH2-CH1-hinge-CH2-CH3, and a third monomer comprising VL-CL. The VL pairs with the VH1 to form a binding domain with a first antigen binding specificity; and the VL pairs with the VH2 to form a binding domain with a second antigen binding specificity. FIG. 26D depicts the “2+1 Common Light Chain” or “2+1 CLC” format, with a first Fc comprising 2 Fab arms each binding a first antigen and a second Fc comprising 1 Fab arm binding a second antigen. The 2+1 CLC format comprises a first monomer comprising VH1-CH1-hinge-VH1-CH1-hinge-CH2-CH3, a second monomer comprising VH2-CH1-hinge-CH2-CH3, and a third monomer comprising VL-CL. The VL pairs with the first and second VH1 to form binding domains with a first antigen binding specificity; and the VL pairs with the VH2 to form a binding domain with a second antigen binding specificity. FIG. 26E depicts the “2+1 mAb-scFv” format, with a first Fc comprising an N-terminal Fab arm binding a first antigen and a second Fc comprising an N-terminal Fab arm binding the first antigen and a C-terminal scFv binding a second antigen. The 2+1 mAb-scFv format comprises a first monomer comprising VH1-CH1-hinge-CH2-CH3, a second monomer comprising VH1-CH1-hinge-CH2-CH3-scFv, and a third monomer comprising VL-CL. The VL pairs with the first and second VH1 to form binding domains with binding specificity for the first antigen.

[0076] FIGS. 27A-27E depicts a couple of formats of the present invention as utilized in CD28 bispecific antibodies. FIG. 27A depicts the “1+1 Fab-scFv-Fc” format, with a first Fab arm binding a tumor-associated antigen and a second scFv arm binding CD28. The 1+1 Fab-scFv-Fc format comprises a first monomer comprising a first heavy chain variable region (VH1) covalently attached to the N-terminus of a first heterodimeric Fc backbone (optionally via a linker), a second monomer comprising a single-chain Fv covalently attached to the N-terminus of a second corresponding heterodimeric Fc backbone (optionally via a linker), and a third monomer comprising a light chain variable region covalently to a light chain constant domain, wherein the light chain variable region is complementary to the VH1. FIG. 27B depicts the “2+1 Fab₂-scFv-Fc” format, with a first Fab arm and a second Fab-scFv arm, wherein the Fab binds a tumor-associated antigen and the scFv binds CD28. The 2+1 Fab₂-scFv-Fc format comprises a first monomer comprising a first heavy chain variable region (VH1) covalently attached to the N-terminus of a first heterodimeric Fc backbone (optionally via a linker), a second monomer comprising the VH1 covalently attached (optionally via a linker) to a single-chain Fv covalently attached (optionally via a linker) to the N-terminus of a second corresponding heterodimeric Fc backbone, and a third monomer comprising a light chain variable region covalently to a light chain constant domain, wherein the light chain variable region is complementary to the VH1. FIG. 27C depicts the “1+1 Common Light Chain” or “1+1 CLC” format, with a first Fc comprising a first Fab arm binding a tumor-associated antigen and a second Fc comprising a second Fab arm binding CD28. The 1+1 CLC format comprises a first monomer comprising VH1-CH1-hinge-CH2-CH3, a second monomer comprising VH2-CH1-hinge-CH2-CH3, and a third monomer comprising VL-CL. The VL pairs with the VH1 to form a binding domain with a first antigen binding specificity; and the VL pairs with the VH2 to form a binding domain with a second antigen binding specificity. FIG. 27D depicts the “2+1 Common Light Chain” or “2+1 CLC” format, with a first Fc comprising 2 Fab arms each binding a tumor-associated antigen and a second Fc comprising 1 Fab arm binding CD28. The 2+1 CLC format comprises a first monomer comprising VH1-CH1-hinge-VH1-CH1-hinge-CH2-CH3, a second monomer comprising VH2-CH1-hinge-CH2-CH3, and a third monomer comprising VL-CL. The VL pairs with the first and second VH1 to form binding domains with a first antigen binding specificity; and the VL pairs with the VH2 to form a binding domain with a second antigen binding specificity. FIG. 27E depicts the “2+1 mAb-scFv” format, with a first Fc comprising an N-terminal Fab arm binding a tumor-associated antigen and a second Fc comprising an N-terminal Fab arm binding a tumor-associated antigen and a C-terminal scFv binding CD28. The 2+1 mAb-scFv format comprises a first monomer comprising VH1-CH1-hinge-CH2-CH3, a second monomer comprising VH1-CH1-hinge-CH2-CH3-scFv, and a third monomer comprising VL-CL. The VL pairs with the first and second VH1 to form binding domains with binding specificity for the tumor-associated antigen.

[0077] FIG. 28 depicts the variable heavy and variable light chain sequences for 2G4, an exemplary humanized hybridoma-derived PD-L1 binding domain, as well as the sequences for XENP25859, an anti-PD-L1 mAb based on 2G4 and IgG1 backbone with E233P/L234V/L235A/G236del/S267K ablation variant, and XENP36627, a monovalent anti-PD-L1 mAb based on 2G4. CDRs are underlined and slashes indicate the border(s) between the variable regions and constant domain. As noted herein and is true for every sequence herein containing CDRs, the exact identification of the CDR locations may be slightly different depending on the numbering used as is shown in Table 2, and thus included herein are not only the CDRs that are underlined but also CDRs included within the VH and VL domains using other numbering systems. Furthermore, as for all the sequences in the Figures, these VH and VL sequences can be used either in a scFv format or in a Fab format.

[0078] FIGS. 29A-29C depict the sequences for affinity-optimized variable heavy domains from anti-PDL1 clone 2G4. It should be noted that the variable heavy domains can be paired with any of the other variable light domains depicted herein including SEQ ID NOs: 1046 and 1103-1155 (see FIGS. 28 and 30A-30C, e.g. 2G4_H1.12_L1.14 as utilized in XENP40706).

[0079] FIGS. 30A-30C depict the sequences for affinity-optimized variable light domain from anti-PDL1 clone 2G4. It should be noted that the variable light domains can be paired with any of the other variable heavy domains depicted herein including SEQ ID NOs: 1042 and 1055-1099 (see FIGS. 28 and 29A-29C, e.g. 2G4_H1.12_L1.14 as utilized in XENP40706).

[0080] FIGS. 31A-31G depict the sequence for illustrative affinity-optimized 2G4 VH/VL pairs. It should be noted that these pairs may be formatted as Fabs or as scFvs.

[0081] FIG. 32 depicts A) classic T cell/APC interaction and B) replication of the classic T cell/APC interaction by combining CD3 bispecific antibodies with CD28 bispecific antibodies. In classic T cell/APC interaction, there is a first signal provided by TCR reactivity with peptide-MHC (Signal 1) and a second signal provided by CD28 crosslinking by CD80/CD86 being expressed on APCs (Signal 2) which together fully activate T cells. In contrast in treatment with CD3 bispecifics, only the first signal is provided. The CD28 signal may be provided by a CD28 bispecific with the idea to promote activation and proliferation through CD28 costimulation.

[0082] FIG. 33 depicts the introduction of CD28 signaling by a CD28 bispecific antibody and mitigation of any checkpoint mediated repression of the added CD28 signal by checkpoint blockade (e.g. PD-1 blockade).

[0083] FIG. 34 depicts that PD-L1×CD28 bispecific antibodies provide Signal 2 while advantageously further enabling blockade of PD-L1:PD1 interaction.

[0084] FIGS. 35A-35S depict the sequences for illustrative αPD-L1×αCD28 bsAbs in the 1+1 Fab-scFv-Fc format. CDRs are underlined, linkers are double-underlined, and slashes indicate the border(s) between the variable regions, Fc regions, and constant domains. It should be noted that the αPD-L1×αCD28 bsAbs can utilize variable region, Fc region, and constant domain sequences that are 90, 95, 98 and 99% identical (as defined herein), and/or contain from 1, 2, 3, 4, 5, 6, 7, 8, 9 or 10 amino acid substitutions. In addition, each sequence outlined herein can include or exclude the M428L/N434S variants in one or preferably both Fc domains, which including M428L/N434S results in longer half-life in serum.

[0085] FIG. 36 depicts the sequences for illustrative αPD-L1×αCD28 bsAbs in the 2+1 Fab₂-scFv-Fc format. CDRs are underlined, linkers are double-underlined, and slashes indicate the border(s) between the variable regions, Fc regions, and constant domains. The scFv domain has orientation (N- to C-terminus) of VH-scFv linker-VL, although this can be reversed. It should be noted that the scFv domain sequences includes as the scFv linker between the variable heavy and variable light region the sequence /GKPGSGKPGSGKPGSGKPGS/ (SEQ ID NO:892); however, this linker can be replaced with any of the scFv linkers in FIG. 6. It should also be noted that the Chain 2 sequences include as the domain linker between the C-terminus of the scFv and the N-terminus of the CH2 domain the sequence GGGGSGGGGSKTHTCPPCP (SEQ ID NO:930), which is a “flex half hinge” domain linker; however, this linker can be replaced with any of the “useful domain linkers” of FIG. 7. It should be noted that the αPD-L1×αCD28 bsAbs can utilize variable region, Fc region, and constant domain sequences that are 90, 95, 98 and 99% identical (as defined herein), and/or contain from 1, 2, 3, 4, 5, 6, 7, 8, 9 or 10 amino acid substitutions. In addition, each sequence outlined herein can include or exclude the M428L/N434S variants in one or preferably both Fc domains, which results in longer half-life in serum.

[0086] FIG. 37 depicts the sequences for illustrative αPDL1×αCD28 bsAbs in the 2+1 mAb-scFv format. CDRs are underlined and slashes indicate the border(s) between the variable regions, linkers, Fc regions, and constant domains. The scFv domain has orientation (N- to C-terminus) of V_{H}-scFv linker-V_{L}, although this can be reversed. It should be noted that the Chain 2 sequences include as a domain linker the sequence /GKPGSGKPGSGKPGSGKPGS/ (SEQ ID NO:892); however, this linker can be replaced with any domain linker include any of the “useful domain linkers” of FIG. 6. It should be noted that the αPDL1×αCD28 bsAbs can utilize variable region, Fc region, and constant domain sequences that are 90, 95, 98 and 99% identical (as defined herein), and/or contain from 1, 2, 3, 4, 5, 6, 7, 8, 9 or 10 amino acid substitutions. In addition, each sequence outlined herein can include or exclude the M428L/N434S variants in one or preferably both Fc domains, which results in longer half-life in serum.

[0087] FIG. 38 depicts the sequences for XENP24118, an anti-PD-L1 mAb based on avelumab and IgG1 backbone with E233P/L234V/L235A/G236del/S267K ablation variant. CDRs are underlined and slashes indicated border(s) between the variable region and constant domain.

[0088] FIG. 39 depicts expansion of CMV+ T cells following incubation of NLV-loaded MDA-MB-231 cancer cells with CD3+ T cells purified from a CMV+donor and either αPD-L1 antibody XENP24118 or αPD-L1×αCD28 bsAb XENP34963. αPD-L1×αCD28 bsAb XENP34963 significantly enhanced T cell expansion in comparison to PD-L1 blockade alone.

[0089] FIG. 40 depicts induction of A) IL-2 secretion, B) IFNγ secretion, and C) CD3+ T cell expansion by 1 μg/ml αB7H3×αCD3 bsAb in combination with αPD-L1 mAb XENP24118 or in combination with αPD-L1×αCD28 bsAb XENP34963. αPD-L1×αCD28 bsAb enhances activity of a CD3 bsAb T cell engager.

[0090] FIGS. 41A and 41B depict the sequences for illustrative αPSMA×αCD3 bsAbs in the 2+1 Fab2-scFv-Fc format and respectively comprising a H1.30_L1.47 anti-CD3 scFv (a.k.a. CD3 High [VHVL]) or a L1.47_H1.32 anti-CD3 scFv (a.k.a. CD3 High-Int #1 [VLVH]). CDRs are underlined and slashes indicate the border(s) between the variable regions and other chain components (e.g. constant region and domain linkers). It should be noted that the αPSMA×αCD3 bsAbs can utilize variable region, Fc region, and constant domain sequences that are 90, 95, 98 and 99% identical (as defined herein), and/or contain from 1, 2, 3, 4, 5, 6, 7, 8, 9 or 10 amino acid substitutions. In addition, each sequence outlined herein can include or exclude the M428L/N434S variants in one or preferably both Fc domains, which results in longer half-life in serum.

[0091] FIG. 42 depicts cell kill over time following incubation of LNCaP cancer cells (PSMA+) with CD3+ T cells at a 1:1 effector:target ratio and illustrative CD3 bispecific (αPSMA×αCD3 XENP32220) alone or in combination with XENP36233. The data show that XENP32220 enhanced cell kill in comparison to incubation of cancer and T cells alone; however, addition of αPD-L1×αCD28 overcomes cancer cell resistance to the CD3 bispecific and further enhances cell kill.

[0092] FIGS. 43A-43B depicts group median change in tumor volume (as determined by caliper measurement; baseline corrected) A) over time (in days after first dose) and B) Day 20 (after first dose) in MC38 (engineered to stably expressing human PD-L1) and huPBMC-engrafted human CD28 knock-in mice dosed with 5 mg/kg αPD-L1 mAb XENP24118, 8.3 mg/kg αPD-L1×αCD28 bsAb XENP34963, 6 mg/kg αPD-L1×αCD28 XENP34961, or PBS control.

[0093] FIGS. 44A-44L depict sequences for exemplary anti-CD3 binding domains suitable for use in CD3 bispecific antibodies which may be combined with the CD28 bispecific antibodies of the invention. The CDRs are underlined, the scFv linker is double underlined (in the sequences, the scFv linker is a positively charged scFv (GKPGS)₄ linker (SEQ ID NO:892), although as will be appreciated by those in the art, this linker can be replaced by other linkers, including uncharged or negatively charged linkers, some of which are depicted in FIG. 6), and the slashes indicate the border(s) of the variable domains. In addition, the naming convention illustrates the orientation of the scFv from N- to C-terminus. As noted herein and is true for every sequence herein containing CDRs, the exact identification of the CDR locations may be slightly different depending on the numbering used as is shown in Table 2, and thus included herein are not only the CDRs that are underlined but also CDRs included within the VH and VL domains using other numbering systems. Furthermore, as for all the sequences in the Figures, these VH and VL sequences can be used either in a scFv format or in a Fab format.

[0094] FIG. 45 depicts the sequence for XENP29154 a.k.a. TGN1412.

[0095] FIG. 46 depicts the release of IFNγ from human PBMCs treated with air-dried XENP28428 (anti-CD28 clone 1A7), TGN1412 (XENP29154), or negative control PBS.

[0096] FIG. 47 depicts the dissociation constant (K_{D}—as an average of result from HIS1K capture vs. streptavidin capture) and corresponding sensorgrams (either HIS1K capture or streptavidin capture) of αPDL1×αCD28 bsAbs having affinity-engineered CD28 binding domains.

[0097] FIG. 48 depicts PD1:PDL1 blockade (binding of PDL1-mFc fusion to PD1-transfected HEK293T cells) by anti-PDL1 clone 2G4 (XENP25859), a partial blocking anti-PDL1 (XENP25853), a non-blocking anti-PDL1 (XENP25858), and XENP24118 (a benchmark anti-PDL1 mAb based on avelumab).

[0098] FIG. 49 depicts induction of A) IL-2 and B) IFNγ release by anti-PDL1 clone 2G4 (XENP25859), a partial blocking anti-PDL1 (XENP25853), a non-blocking anti-PDL1 (XENP25858), and XENP24118 (a benchmark anti-PDL1 mAb based on avelumab). The data show that the partial blocking and non-blocking anti-PDL1 clones induced less cytokine release in comparison to anti-PDL1 clone 2G4.

[0099] FIG. 50 depicts the dissociation constant (K_{D}) of αPDL1×αCD28 bsAbs (1+1 Fab-scFv-Fc format) having affinity-engineered PDL1 binding domains (as well as K_{D} fold improvement over αPDL1×αCD28 bsAb having WT 2G4 binding domain).

[0100] FIG. 51 depicts blockade of PD1:PDL1 interaction during T cell:cancer cell interaction (as modeled by Jurkat-PD1 cells incubated with CHO-PDL1-CD80-αCD3 and CHO-PDL1-αCD3 cells) by αPDL1×αCD28 bsAbs having anti-PDL1 clone 2G4 (XENP36233), a partial blocking anti-PDL1 (XENP36232), a non-blocking anti-PDL1 (XENP26783), and XENP34963 (a benchmark bsAb with an anti-PDL1 arm based on avelumab). The data show that bsAbs comprising partial blocking and non-blocking anti-PDL1 clones induced less activity in comparison to bsAb comprising anti-PDL1 clone 2G4.

[0101] FIG. 52 depicts binding of αPDL1×αCD28 (XENP36233) to parental PDL1^{null} MC38 or MC38 cells transfected to express PDL1 with low or medium high antigen densities.

[0102] FIG. 53 depicts induction of IL-2 release by αPDL1×αCD28 (XENP36233) in the presence of parental PDL1^{null} HEK293T cells or HEK293T transfected to express PDL1 with medium or high antigen densities.

[0103] FIG. 54 depicts induction of cell kill by αPSMA×αCD3 alone or in combination with αPDL1×αCD28 XENP36233 in the presence of CD3+ T cells and PDL1^{null} 22Rv1 cell line at A) 10:1 E:T ratio and B) 1:1 E:T ratio. The data show that αPDL1×αCD28 bsAbs do not synergize with CD3 bsAbs on PDL1 negative cell lines such as 22Rv1.

[0104] FIG. 55 depicts serum concentration of XENP36764 over time in cynomolgus monkeys. The αPDL1×αCD28 bsAb exhibited favorable pharmacokinetics.

[0105] FIG. 56 depicts diagram of assumptions used in a mechanism-based PK/PD computer model.

[0106] FIGS. 57A-57C depicts predictions from the mechanism-based modeling suggesting A) linear PK at dose levels consistent with typical checkpoint inhibitor regimens, B) trimer formation in the tumor indicating costimulation, and C) consistent blockade of PDL1.

[0107] FIG. 58 depicts induction of IL-2 release by αPDL1×αCD28 bsAbs having affinity-engineered CD28 binding domains in the presence of αB7H3×αCD3 bsAb, CD3+ T cells, and A) MDA-MB-231 or B) DU145-NLR cells. The data show that increasing CD28 affinity leads to more potent and efficacious IL-2 secretion by αPDL1×αCD28 bsAbs.

[0108] FIG. 59 depicts induction of cell kill by αPDL1×αCD28 bsAbs having affinity-engineered CD28 binding domains in the presence of αB7H3×αCD3 bsAb, CD3+ T cells, and PDL1^{low} LnCAP cancer cells. The data show that increasing the affinity of CD28 increases targeting of PDL1^{low} cancer cells at low E:T of 1:1.

[0109] FIG. 60 depicts induction of cell kill by αPDL1×αCD28 bsAbs having affinity-engineered CD28 binding domains in the presence of αB7H3×αCD3 bsAb, CD3+ T cells, and PDL1^{med} DU145 cells. The data show that increasing the affinity of CD28 increases targeting of PDL1^{med} cancer cells at even lower E:T of 0.1:1.

[0110] FIGS. 61A-61D depict change in tumor volume (as determined by caliper measurements; baseline corrected) in individual mouse over time and D) on Day 28 in hPDL1-MC38-engrafted hCD28 knock-in mice dosed with A) PBS control, B) monovalent αPDL1 mAb XENP36627, and C) XENP37261 having enhanced CD28 binding affinity.

[0111] FIG. 62 depicts induction of IL-2 release by αPDL1×αCD28 bsAbs having affinity-engineered PDL1 binding domains in the presence of αB7H3×αCD3 bsAb, CD3+ T cells, and DU145-NLR cells. The data show that increasing PDL1 affinity promotes IL-2 secretion.

[0112] FIGS. 63A and 63B depict induction of A) 1L2 and B) IFNγ release by αPDL1 mAb XENP24118 and αPDL1×αCD28 bsAb XENP38514 having enhanced PDL1 binding in a DC: T cell MLR. The data show that αPDL1×αCD28 enhanced T cell/APC interaction.

[0113] FIG. 64 depicts PD1:PDL1 blockade (binding of PDL1-mFc fusion to PD1-transfected HEK293T cells) by αPDL1×αCD28 bsAbs having affinity-engineered PDL1 binding domains. The data show the αPDL1×αCD28 bsAbs can block interaction between PD1 and PDL1.

[0114] FIG. 65 depicts induction of IL-2 release by αPDL1×αCD28 bsAbs having affinity-engineered CD28 binding domains and affinity-engineered PDL1 binding domains in the presence of SEB-stimulated PBMCs. The data show that increasing PDL1 affinity promotes IL-2 secretion.

[0115] FIG. 66 depicts induction of IL-2 release by αPDL1×αCD28 bsAbs having affinity-engineered CD28 binding domains and affinity-engineered PDL1 binding domains in the presence of CD3+ enriched T cells, MDA-MB0231 transfected to express αCD3 scFv (to act as Signal 1), and 1 μg/mL of an illustrative B7H3×CD3 bsAb. The data show that XENP40409 (non-Xtend analog of XENP40706) having 2G4_H1.12_L1.14 induced IL2 production most potently.

[0116] FIGS. 67A and 67B depict CD28 receptor occupancy on cynomolgus T cells (as indicated by decrease in binding by secondary CD28 mAb) after dosing with A) XENP36803 (1× dose, 4× dose, and 10× dose) or B) XENP36764 (4× dose, 10× dose, and 20× dose). The data show CD28 receptor occupancy up to day 14 on T cells.

[0117] FIGS. 68A and 68B depict PDL1 receptor occupancy on cynomolgus activated monocytes (decrease in free receptor as indicated by decrease in binding by one-arm PDL1 mAb based on 2G4) after dosing with A) XENP36803 (1× dose, 4× dose, and 10× dose) or B) XENP36764 (4× dose, 10× dose, and 20× dose).

[0118] FIGS. 69A and 69B depict proliferation of cynomolgus T cells (as indicated by increased Ki67 expression) after dosing with A) XENP36803 (1× dose, 4× dose, and 10× dose) or B) XENP36764 (4× dose, 10× dose, and 20× dose). Notably, the PDL1×CD28 bsAbs selectively induce proliferation of effector CD4+ and CD8+ T cells (i.e. CD45RA−).

[0119] FIG. 70 depicts consensus framework regions (FR) and complementarity determining regions (CDRs) (as in Kabat) for anti-CD28 clone 1A7 variable heavy and variable light domain variants. In some embodiments, the CD28 antigen binding domain provided herein includes one or more of the sequences depicted in FIG. 70.

[0120] FIG. 71 depicts consensus framework regions (FR) and complementarity determining regions (CDRs) (as in Kabat) for anti-PDL1 clone 2G4 variable heavy and variable light domain variants. In some embodiments, the PD-L1 antigen binding domain provided herein includes one or more of the sequences depicted in FIG. 71.

### DETAILED DESCRIPTION

### I. Overview

[0121] Provided herein are novel anti-PD-L1 antibodies, including novel anti-CD28×anti-PD-L1 (also referred to as “αCD28×α PD-L1”) bispecific antibodies, and methods of using such antibodies for the treatment of cancers. Subject αCD28×α PD-L1 antibodies are capable of agonistically binding to CD28 costimulatory molecules on T cells and targeting to PD-L1 on tumor cells. Thus, such antibodies selectively enhance anti-tumor activity at tumor sites while minimizing peripheral toxicity. The subject antibodies provided herein are particularly useful for enhancing anti-tumor activity when used in combination with other anti-cancer therapies.

[0122] Accordingly, in one aspect, provided herein are heterodimeric antibodies that bind to two different antigens, e.g., the antibodies are “bispecific,” in that they bind two different target antigens, generally CD28 and PD-L1 as described below. These heterodimeric antibodies can bind each of the target antigens either monovalently (e.g., there is a single antigen binding domain such as a variable heavy and variable light domain pair) or bivalently (there are two antigen binding domains that each independently bind the antigen). In some embodiments, the heterodimeric antibody provided herein includes one CD28 binding domain and one PD-L1 binding domain (e.g., heterodimeric antibodies in the “1+1 Fab-scFv-Fc” format described herein). In other embodiments, the heterodimeric antibody provided herein includes one CD28 binding domain and two PD-L1 binding domains (e.g., heterodimeric antibodies in the “2+1 Fab2-scFv-Fc” formats described herein). The heterodimeric antibodies provided herein are based on the use of different monomers that contain amino acid substitutions (i.e., skew variants”) that “skew” formation of heterodimers over homodimers, as is more fully outlined below. In some embodiments, the heterodimer antibodies are also coupled with “pI variants” that allow simple purification of the heterodimers away from the homodimers, as is similarly outlined below. The heterodimeric bispecific antibodies provided generally rely on the use of engineered or variant Fc domains that can self-assemble in production cells to produce heterodimeric proteins, and methods to generate and purify such heterodimeric proteins.

### II. Nomenclature

[0123] The antibodies provided herein are listed in several different formats. In some instances, each monomer of a particular antibody is given a unique “XENP” number, although as will be appreciated in the art, a longer sequence might contain a shorter one. For example, a “scFv-Fc” monomer of a 1+1 Fab-scFv-Fc format antibody may have a first XENP number, while the scFv domain itself will have a different XENP number. Some molecules have three polypeptides, so the XENP number, with the components, is used as a name. Thus, the molecule XENP36154, which is in 2+1 Fab₂-scFv-Fc format, comprises three sequences (see FIG. 36) a “Fab-Fc Heavy Chain” monomer (“Chain 1”); 2) a “Fab-scFv-Fc Heavy Chain” monomer (“Chain 2”); and 3) a “Light Chain” monomer or equivalents, although one of skill in the art would be able to identify these easily through sequence alignment. These XENP numbers are in the sequence listing as well as identifiers, and used in the Figures. In addition, one molecule, comprising the three components, gives rise to multiple sequence identifiers. For example, the listing of the Fab includes the full heavy chain sequence, the variable heavy domain sequence and the three CDRs of the variable heavy domain sequence, the full light chain sequence, a variable light domain sequence and the three CDRs of the variable light domain sequence. A Fab-scFv-Fc monomer includes a full-length sequence, a variable heavy domain sequence, 3 heavy CDR sequences, and an scFv sequence (include scFv variable heavy domain sequence, scFv variable light domain sequence and scFv linker). Note that some molecules herein with a scFv domain use a single charged scFv linker (+H), although others can be used. In addition, the naming nomenclature of particular antigen binding domains (e.g., PD-L1 and CD28 binding domains) use a “Hx.xx_Ly.yy” or “Hx.xxLy.yy” type of format, with the numbers being unique identifiers to particular variable chain sequences. Thus, the variable domain of the Fab side of PD-L1 binding domain 2G4[PDL1](e.g., FIG. 28) is “H1L1”, which indicates that the variable heavy domain, H1, was combined with the light domain L1. In the case that these sequences are used as scFvs, the designation “H1_L1” or “H1L1”, indicates that the variable heavy domain, H1 is combined with the light domain, L1, and is in VH-linker-VL orientation, from N- to C-terminus. This molecule with the identical sequences of the heavy and light variable domains but in the reverse order (VL-linker-VH orientation, from N- to C-terminus) would be designated “L1_H1”. Similarly, different constructs may “mix and match” the heavy and light chains as will be evident from the sequence listing and the figures.

### III. Definitions

[0124] In order that the application may be more completely understood, several definitions are set forth below. Such definitions are meant to encompass grammatical equivalents.

[0125] By “CD28,” “Cluster of Differentiation 28,” and “Tp44” (e.g., Genebank Accession Numbers NP_001230006 (human), NP_001230007 (human), NP_006130 (human), and NP_031668 (mouse)) herein is meant a B7 receptor expressed on T cells that provides co-stimulatory signals required for T cell activation and survival. T cell stimulation through CD28 in addition to the T cell receptor (TCR) provides a potent signal for the production of various interleukins. CD28 is the receptor for CD80 (B7.1) and CD86 (B7.2) proteins. CD28 includes an intercellular domain with a YMNM motif critical for the recruitment of SH2-domain containing proteins, particularly PI3K. CD28 also includes two proline-rich motifs that are able to bind SH3-containing proteins. Exemplary CD28 sequences are depicted in FIG. 1.

[0126] By “ablation” herein is meant a decrease or removal of activity. Thus, for example, “ablating FcγR binding” means the Fc region amino acid variant has less than 50% starting binding as compared to an Fc region not containing the specific variant, with more than 70-80-90-95-98% loss of activity being preferred, and in general, with the activity being below the level of detectable binding in a Biacore, SPR or BLI assay. Of particular use in the ablation of FcγR binding are those shown in FIG. 5, which generally are added to both monomers.

[0127] By “ADCC” or “antibody dependent cell-mediated cytotoxicity” as used herein is meant the cell-mediated reaction, wherein nonspecific cytotoxic cells that express FcγRs recognize bound antibody on a target cell and subsequently cause lysis of the target cell. ADCC is correlated with binding to FcγRIIIa; increased binding to FcγRIIIa leads to an increase in ADCC activity.

[0128] By “ADCP” or antibody dependent cell-mediated phagocytosis as used herein is meant the cell-mediated reaction wherein nonspecific phagocytic cells that express FcγRs recognize bound antibody on a target cell and subsequently cause phagocytosis of the target cell.

[0129] As used herein, the term “antibody” is used generally. Antibodies provided herein can take on a number of formats as described herein, including traditional antibodies as well as antibody derivatives, fragments and mimetics, described herein.

[0130] Traditional immunoglobulin (Ig) antibodies are “Y” shaped tetramers. Each tetramer is typically composed of two identical pairs of polypeptide chains, each pair having one “light chain” monomer (typically having a molecular weight of about 25 kDa) and one “heavy chain” monomer (typically having a molecular weight of about 50-70 kDa).

[0131] Other useful antibody formats include, but are not limited to, the “1+1 Fab-scFv-Fc,” “2+1 Fab₂-scFv-Fc,” “1+1 common light chain,” and “2+1 common light chain” formats provided herein (see, e.g., FIG. 26). Additional useful antibody formats include, but are not limited to, “mAb-Fv,” “mAb-scFv,” “central-Fv”, “one armed scFv-mAb,” “scFv-mAb,” “dual scFv,” and “trident” format antibodies, as disclosed in US20180127501A1, which is incorporated by reference herein, particularly in pertinent part relating to antibody formats (see, e.g., FIG. 2).

[0132] Antibody heavy chains typically include a variable heavy (VH) domain, which includes vhCDR1-3, and an Fc domain, which includes a CH2-CH3 monomer. In some embodiments, antibody heavy chains include a hinge and CH1 domain. Traditional antibody heavy chains are monomers that are organized, from N- to C-terminus: VH-CH1-hinge-CH2-CH3. The CH1-hinge-CH2-CH3 is collectively referred to as the heavy chain “constant domain” or “constant region” of the antibody, of which there are five different categories or “isotypes”: IgA, IgD, IgG, IgE and IgM.

[0133] In some embodiments, the antibodies provided herein include IgG isotype constant domains, which has several subclasses, including, but not limited to IgG1, IgG2, IgG3, and IgG4. In the IgG subclass of immunoglobulins, there are several immunoglobulin domains in the heavy chain. By “immunoglobulin (Ig) domain” herein is meant a region of an immunoglobulin having a distinct tertiary structure. Of interest in the present invention are the heavy chain domains, including, the constant heavy (CH) domains and the hinge domains. In the context of IgG antibodies, the IgG isotypes each have three CH regions. Accordingly, “CH” domains in the context of IgG are as follows: “CH1” refers to positions 118-215 according to the EU index as in Kabat. “Hinge” refers to positions 216-230 according to the EU index as in Kabat. “CH2” refers to positions 231-340 according to the EU index as in Kabat, and “CH3” refers to positions 341-447 according to the EU index as in Kabat. As shown in Table 1, the exact numbering and placement of the heavy chain domains can be different among different numbering systems. As shown herein and described below, the pI variants can be in one or more of the CH regions, as well as the hinge region, discussed below.

[0134] It should be noted that IgG1 has different allotypes with polymorphisms at 356 (D or E) and 358 (L or M). The sequences depicted herein use the 356E/358M allotype, however the other allotype is included herein. That is, any sequence inclusive of an IgG1 Fc domain included herein can have 356D/358L replacing the 356E/358M allotype. It should be understood that therapeutic antibodies can also comprise hybrids of isotypes and/or subclasses. For example, as shown in US Publication 2009/0163699, incorporated by reference, the present antibodies, in some embodiments, include human IgG1/G2 hybrids.

[0135] By “Fc” or “Fc region” or “Fc domain” as used herein is meant the polypeptide comprising the constant region of an antibody, in some instances, excluding all of the first constant region immunoglobulin domain (e.g., CH1) or a portion thereof, and in some cases, optionally including all or part of the hinge. For IgG, the Fc domain comprises immunoglobulin domains CH2 and CH3 (Cγ2 and Cγ3), and optionally all or a portion of the hinge region between CH1 (Cγ1) and CH2 (Cγ2). Thus, in some cases, the Fc domain includes, from N- to C-terminal, CH2-CH3 and hinge-CH2-CH3. In some embodiments, the Fc domain is that from IgG1, IgG2, IgG3 or IgG4, with IgG1 hinge-CH2-CH3 and IgG4 hinge-CH2-CH3 finding particular use in many embodiments. Additionally, in the case of human IgG1 Fc domains, the hinge may include a C220S amino acid substitution. Furthermore, in the case of human IgG4 Fc domains, the hinge may include a S228P amino acid substitution. Although the boundaries of the Fc region may vary, the human IgG heavy chain Fc region is usually defined to include residues E216, C226, or A231 to its carboxyl-terminal, wherein the numbering is according to the EU index as in Kabat. In some embodiments, as is more fully described below, amino acid modifications are made to the Fc region, for example to alter binding to one or more FcγR or to the FcRn.

[0136] By “heavy chain constant region” herein is meant the CH1-hinge-CH2-CH3 portion of an antibody (or fragments thereof), excluding the variable heavy domain; in EU numbering of human IgG1 this is amino acids 118-447. By “heavy chain constant region fragment” herein is meant a heavy chain constant region that contains fewer amino acids from either or both of the N- and C-termini but still retains the ability to form a dimer with another heavy chain constant region.

[0137] Another type of domain of the heavy chain is the hinge region. By “hinge” or “hinge region” or “antibody hinge region” or “hinge domain” herein is meant the flexible polypeptide comprising the amino acids between the first and second constant domains of an antibody. Structurally, the IgG CH1 domain ends at EU position 215, and the IgG CH2 domain begins at residue EU position 231. Thus for IgG the antibody hinge is herein defined to include positions 216 (E216 in IgG1) to 230 (P230 in IgG1), wherein the numbering is according to the EU index as in Kabat. In some cases, a “hinge fragment” is used, which contains fewer amino acids at either or both of the N- and C-termini of the hinge domain. As noted herein, pI variants can be made in the hinge region as well. Many of the antibodies herein have at least one the cysteines at position 220 according to EU numbering (hinge region) replaced by a serine. Generally, this modification is on the “scFv monomer” side for most of the sequences depicted herein, although it can also be on the “Fab monomer” side, or both, to reduce disulfide formation. Specifically included within the sequences herein are one or both of these cysteines replaced (C220S).

[0138] As will be appreciated by those in the art, the exact numbering and placement of the heavy chain constant region domains (i.e., CH1, hinge, CH2 and CH3 domains) can be different among different numbering systems. A useful comparison of heavy constant region numbering according to EU and Kabat is as below, see Edelman et al., 1969, Proc Natl Acad Sci USA 63:78-85 and Kabat et al., 1991, Sequences of Proteins of Immunological Interest, 5th Ed., United States Public Health Service, National Institutes of Health, Bethesda, entirely incorporated by reference.

TABLE 1

| | EU Numbering | Kabat Numbering |
|---|---|---|
| CH1 | 118-215 | 114-223 |
| Hinge | 216-230 | 226-243 |
| CH2 | 231-340 | 244-360 |
| CH3 | 341-447 | 361-478 |

[0139] The antibody light chain generally comprises two domains: the variable light domain (VL), which includes light chain CDRs vlCDR1-3, and a constant light chain region (often referred to as CL or Cκ). The antibody light chain is typically organized from N- to C-terminus: VL-CL.

[0140] By “antigen binding domain” or “ABD” herein is meant a set of six Complementary Determining Regions (CDRs) that, when present as part of a polypeptide sequence, specifically binds a target antigen (e.g., PD-L1 or CD28) as discussed herein. As is known in the art, these CDRs are generally present as a first set of variable heavy CDRs (vhCDRs or VHCDRs) and a second set of variable light CDRs (vlCDRs or VLCDRs), each comprising three CDRs: vhCDR1, vhCDR2, vhCDR3 variable heavy CDRs and vlCDR1, vlCDR2 and vlCDR3 vhCDR3 variable light CDRs. The CDRs are present in the variable heavy domain (vhCDR1-3) and variable light domain (vlCDR1-3). The variable heavy domain and variable light domain from an Fv region.

[0141] The present invention provides a large number of different CDR sets. In this case, a “full CDR set” comprises the three variable light and three variable heavy CDRs, e.g., a vlCDR1, vlCDR2, vlCDR3, vhCDR1, vhCDR2 and vhCDR3. These can be part of a larger variable light or variable heavy domain, respectfully. In addition, as more fully outlined herein, the variable heavy and variable light domains can be on separate polypeptide chains, when a heavy and light chain is used (for example when Fabs are used), or on a single polypeptide chain in the case of scFv sequences.

[0142] As will be appreciated by those in the art, the exact numbering and placement of the CDRs can be different among different numbering systems. However, it should be understood that the disclosure of a variable heavy and/or variable light sequence includes the disclosure of the associated (inherent) CDRs. Accordingly, the disclosure of each variable heavy region is a disclosure of the vhCDRs (e.g., vhCDR1, vhCDR2 and vhCDR3) and the disclosure of each variable light region is a disclosure of the vlCDRs (e.g., vlCDR1, vlCDR2 and vlCDR3). A useful comparison of CDR numbering is as below, see Lafranc et al., Dev. Comp. Immunol. 27(1):55-77 (2003):

TABLE 2

| | Kabat + | | | | | | |
|---|---|---|---|---|---|---|---|
| | Chothia | IMGT | Kabat | AbM | Chothia | Contact | Xencor |
| vhCDR1 | 26-35 | 27-38 | 31-35 | 26-35 | 26-32 | 30-35 | 27-35 |
| vhCDR2 | 50-65 | 56-65 | 50-65 | 50-58 | 52-56 | 47-58 | 54-61 |
| vhCDR3 | 95-102 | 105-117 | 95-102 | 95-102 | 95-102 | 93-101 | 103-116 |
| vlCDR1 | 24-34 | 27-38 | 24-34 | 24-34 | 24-34 | 30-36 | 27-38 |
| vlCDR2 | 50-56 | 56-65 | 50-56 | 50-56 | 50-56 | 46-55 | 56-62 |
| vlCDR3 | 89-97 | 105-117 | 89-97 | 89-97 | 89-97 | 89-96 | 97-105 |

[0143] Throughout the present specification, the Kabat numbering system is generally used when referring to a residue in the variable domain (approximately, residues 1-107 of the light chain variable region and residues 1-113 of the heavy chain variable region) and the EU numbering system for Fc regions (e.g., Kabat et al., supra (1991)).

[0144] The CDRs contribute to the formation of the antigen-binding, or more specifically, epitope binding site of the antigen binding domains and antibodies. “Epitope” refers to a determinant that interacts with a specific antigen binding site in the variable region of an antibody molecule known as a paratope. Epitopes are groupings of molecules such as amino acids or sugar side chains and usually have specific structural characteristics, as well as specific charge characteristics. A single antigen may have more than one epitope.

[0145] The epitope may comprise amino acid residues directly involved in the binding (also called immunodominant component of the epitope) and other amino acid residues, which are not directly involved in the binding, such as amino acid residues which are effectively blocked by the specifically antigen binding peptide; in other words, the amino acid residue is within the footprint of the specifically antigen binding peptide.

[0146] Epitopes may be either conformational or linear. A conformational epitope is produced by spatially juxtaposed amino acids from different segments of the linear polypeptide chain. A linear epitope is one produced by adjacent amino acid residues in a polypeptide chain. Conformational and nonconformational epitopes may be distinguished in that the binding to the former but not the latter is lost in the presence of denaturing solvents.

[0147] An epitope typically includes at least 3, and more usually, at least 5 or 8-10 amino acids in a unique spatial conformation. Antibodies that recognize the same epitope can be verified in a simple immunoassay showing the ability of one antibody to block the binding of another antibody to a target antigen, for example “binning.” As outlined below, the invention not only includes the enumerated antigen binding domains and antibodies herein, but those that compete for binding with the epitopes bound by the enumerated antigen binding domains.

[0148] In some embodiments, the six CDRs of the antigen binding domain are contributed by a variable heavy and a variable light domain. In a “Fab” format, the set of 6 CDRs are contributed by two different polypeptide sequences, the variable heavy domain (vh or VH; containing the vhCDR1, vhCDR2 and vhCDR3) and the variable light domain (vl or VL; containing the vlCDR1, vlCDR2 and vlCDR3), with the C-terminus of the vh domain being attached to the N-terminus of the CH1 domain of the heavy chain and the C-terminus of the vl domain being attached to the N-terminus of the constant light domain (and thus forming the light chain). In a scFv format, the vh and vl domains are covalently attached, generally through the use of a linker (a “scFv linker”) as outlined herein, into a single polypeptide sequence, which can be either (starting from the N-terminus) vh-linker-vl or vl-linker-vh, with the former being generally preferred (including optional domain linkers on each side, depending on the format used (e.g., from FIG. 26). In general, the C-terminus of the scFv domain is attached to the N-terminus of the hinge in the second monomer.

[0149] By “variable region” or “variable domain” as used herein is meant the region of an immunoglobulin that comprises one or more Ig domains substantially encoded by any of the Vκ, Vλ, and/or VH genes that make up the kappa, lambda, and heavy chain immunoglobulin genetic loci respectively, and contains the CDRs that confer antigen specificity. Thus, a “variable heavy domain” pairs with a “variable light domain” to form an antigen binding domain (“ABD”). In addition, each variable domain comprises three hypervariable regions (“complementary determining regions,” “CDRs”) (vhCDR1, vhCDR2 and vhCDR3 for the variable heavy domain and vlCDR1, vlCDR2 and vlCDR3 for the variable light domain) and four framework (FR) regions, arranged from amino-terminus to carboxy-terminus in the following order: FR1-CDR1-FR2-CDR2-FR3-CDR3-FR4.

[0150] By “Fab” or “Fab region” as used herein is meant the antibody region that comprises the VH, CH1, VL, and CL immunoglobulin domains, generally on two different polypeptide chains (e.g., VH-CH1 on one chain and VL-CL on the other). Fab may refer to this region in isolation, or this region in the context of a bispecific antibody of the invention. In the context of a Fab, the Fab comprises an Fv region in addition to the CH1 and CL domains.

[0151] By “Fv” or “Fv fragment” or “Fv region” as used herein is meant the antibody region that comprises the VL and VH domains. Fv regions can be formatted as both Fabs (as discussed above, generally two different polypeptides that also include the constant regions as outlined above) and single chain Fvs (scFvs), where the vl and vh domains are included in a single peptide, attached generally with a linker as discussed herein.

[0152] By “single chain Fv” or “scFv” herein is meant a variable heavy domain covalently attached to a variable light domain, generally using a scFv linker as discussed herein, to form a scFv or scFv domain. A scFv domain can be in either orientation from N- to C-terminus (vh-linker-vl or vl-linker-vh). In the sequences depicted in the sequence listing and in the figures, the order of the vh and vl domain is indicated in the name, e.g., H.X_L.Y means N-to C-terminal is vh-linker-vl, and L.Y_H.X is vl-linker-vh.

[0153] Some embodiments of the subject antibodies provided herein comprise at least one scFv domain, which, while not naturally occurring, generally includes a variable heavy domain and a variable light domain, linked together by a scFv linker. As outlined herein, while the scFv domain is generally from N- to C-terminus oriented as VH-scFv linker-VL, this can be reversed for any of the scFv domains (or those constructed using vh and vl sequences from Fabs), to VL-scFv linker-VH, with optional linkers at one or both ends depending on the format.

[0154] By “modification” or “variant” herein is meant an amino acid substitution, insertion, and/or deletion in a polypeptide sequence or an alteration to a moiety chemically linked to a protein. For example, a modification may be an altered carbohydrate or PEG structure attached to a protein. By “amino acid modification” herein is meant an amino acid substitution, insertion, and/or deletion in a polypeptide sequence. For clarity, unless otherwise noted, the amino acid modification is always to an amino acid coded for by DNA, e.g., the 20 amino acids that have codons in DNA and RNA.

[0155] By “amino acid substitution” or “substitution” herein is meant the replacement of an amino acid at a particular position in a parent polypeptide sequence with a different amino acid. In particular, in some embodiments, the substitution is to an amino acid that is not naturally occurring at the particular position, either not naturally occurring within the organism or in any organism. For example, the substitution E272Y refers to a variant polypeptide, in this case an Fc variant, in which the glutamic acid at position 272 is replaced with tyrosine. For clarity, a protein which has been engineered to change the nucleic acid coding sequence but not change the starting amino acid (for example exchanging CGG (encoding arginine) to CGA (still encoding arginine) to increase host organism expression levels) is not an “amino acid substitution;” that is, despite the creation of a new gene encoding the same protein, if the protein has the same amino acid at the particular position that it started with, it is not an amino acid substitution.

[0156] By “amino acid insertion” or “insertion” as used herein is meant the addition of an amino acid sequence at a particular position in a parent polypeptide sequence. For example, −233E or 233E designates an insertion of glutamic acid after position 233 and before position 234. Additionally, −233ADE or A233ADE designates an insertion of AlaAspGlu after position 233 and before position 234.

[0157] By “amino acid deletion” or “deletion” as used herein is meant the removal of an amino acid sequence at a particular position in a parent polypeptide sequence. For example, E233− or E233 #, E233( ) or E233del designates a deletion of glutamic acid at position 233. Additionally, EDA233− or EDA233 #designates a deletion of the sequence GluAspAla that begins at position 233.

[0158] By “variant protein” or “protein variant”, or “variant” as used herein is meant a protein that differs from that of a parent protein by virtue of at least one amino acid modification. The protein variant has at least one amino acid modification compared to the parent protein, yet not so many that the variant protein will not align with the parental protein using an alignment program such as that described below. In general, variant proteins (such as variant Fc domains, etc., outlined herein, are generally at least 75, 80, 85, 90, 91, 92, 93, 94, 95, 96, 97, 98 or 99% identical to the parent protein, using the alignment programs described below, such as BLAST.

[0159] “Variant” as used herein also refers to particular amino acid modifications that confer particular function (e.g., a “heterodimerization variant,” “pI variant,” “ablation variant,” etc.).

[0160] As described below, in some embodiments the parent polypeptide, for example an Fc parent polypeptide, is a human wild type sequence, such as the heavy constant domain or Fc region from IgG1, IgG2, IgG3 or IgG4, although human sequences with variants can also serve as “parent polypeptides”, for example the IgG1/2 hybrid of US Publication 2006/0134105 can be included. The protein variant sequence herein will preferably possess at least about 80% identity with a parent protein sequence, and most preferably at least about 90% identity, more preferably at least about 95-98-99% identity. Accordingly, by “antibody variant” or “variant antibody” as used herein is meant an antibody that differs from a parent antibody by virtue of at least one amino acid modification, “IgG variant” or “variant IgG” as used herein is meant an antibody that differs from a parent IgG (again, in many cases, from a human IgG sequence) by virtue of at least one amino acid modification, and “immunoglobulin variant” or “variant immunoglobulin” as used herein is meant an immunoglobulin sequence that differs from that of a parent immunoglobulin sequence by virtue of at least one amino acid modification. “Fc variant” or “variant Fc” as used herein is meant a protein comprising an amino acid modification in an Fc domain as compared to an Fc domain of human IgG1, IgG2 or IgG4.

[0161] “Fc variant” or “variant Fc” as used herein is meant a protein comprising an amino acid modification in an Fc domain. The modification can be an addition, deletion, or substitution. The Fc variants are defined according to the amino acid modifications that compose them. Thus, for example, N434S or 434S is an Fc variant with the substitution for serine at position 434 relative to the parent Fc polypeptide, wherein the numbering is according to the EU index. Likewise, M428L/N434S defines an Fc variant with the substitutions M428L and N434S relative to the parent Fc polypeptide. The identity of the WT amino acid may be unspecified, in which case the aforementioned variant is referred to as 428L/434S. It is noted that the order in which substitutions are provided is arbitrary, that is to say that, for example, 428L/434S is the same Fc variant as 434S/428L, and so on. For all positions discussed herein that relate to antibodies or derivatives and fragments thereof (e.g., Fc domains), unless otherwise noted, amino acid position numbering is according to the EU index. The “EU index” or “EU index as in Kabat” or “EU numbering” scheme refers to the numbering of the EU antibody (Edelman et al., 1969, Proc Natl Acad Sci USA 63:78-85, hereby entirely incorporated by reference). The modification can be an addition, deletion, or substitution.

[0162] In general, variant Fc domains have at least about 80, 85, 90, 95, 97, 98 or 99 percent identity to the corresponding parental human IgG Fc domain (using the identity algorithms discussed below, with one embodiment utilizing the BLAST algorithm as is known in the art, using default parameters). Alternatively, the variant Fc domains can have from 1, 2, 3, 4, 5, 6, 7, 8, 9, 10, 11, 12, 13, 14, 15, 16, 11, 12, 13, 14, 15, 16, 17, 18, 19 or 20 amino acid modifications as compared to the parental Fc domain. Alternatively, the variant Fc domains can have up to 1, 2, 3, 4, 5, 6, 7, 8, 9, 10, 11, 12, 13, 14, 15, 16, 11, 12, 13, 14, 15, 16, 17, 18, 19 or 20 amino acid modifications as compared to the parental Fc domain. Additionally, as discussed herein, the variant Fc domains described herein still retain the ability to form a dimer with another Fc domain as measured using known techniques as described herein, such as non-denaturing gel electrophoresis.

[0163] By “protein” as used herein is meant at least two covalently attached amino acids, which includes proteins, polypeptides, oligopeptides and peptides. In addition, polypeptides that make up the antibodies of the invention may include synthetic derivatization of one or more side chains or termini, glycosylation, PEGylation, circular permutation, cyclization, linkers to other molecules, fusion to proteins or protein domains, and addition of peptide tags or labels.

[0164] By “residue” as used herein is meant a position in a protein and its associated amino acid identity. For example, Asparagine 297 (also referred to as Asn297 or N297) is a residue at position 297 in the human antibody IgG1.

[0165] By “IgG subclass modification” or “isotype modification” as used herein is meant an amino acid modification that converts one amino acid of one IgG isotype to the corresponding amino acid in a different, aligned IgG isotype. For example, because IgG1 comprises a tyrosine and IgG2 a phenylalanine at EU position 296, a F296Y substitution in IgG2 is considered an IgG subclass modification.

[0166] By “non-naturally occurring modification” as used herein is meant an amino acid modification that is not isotypic. For example, because none of the human IgGs comprise a serine at position 434, the substitution 434S in IgG1, IgG2, IgG3, or IgG4 (or hybrids thereof) is considered a non-naturally occurring modification.

[0167] By “amino acid” and “amino acid identity” as used herein is meant one of the 20 naturally occurring amino acids that are coded for by DNA and RNA.

[0168] By “effector function” as used herein is meant a biochemical event that results from the interaction of an antibody Fc region with an Fc receptor or ligand. Effector functions include but are not limited to ADCC, ADCP, and CDC.

[0169] By “IgG Fc ligand” as used herein is meant a molecule, preferably a polypeptide, from any organism that binds to the Fc region of an IgG antibody to form an Fc/Fc ligand complex. Fc ligands include but are not limited to FcγRIs, FcγRIIs, FcγRIIIs, FcRn, C1q, C3, mannan binding lectin, mannose receptor, staphylococcal protein A, streptococcal protein G, and viral FcγR. Fc ligands also include Fc receptor homologs (FcRH), which are a family of Fc receptors that are homologous to the FcγRs (Davis et al., 2002, Immunological Reviews 190:123-136, entirely incorporated by reference). Fc ligands may include undiscovered molecules that bind Fc. Particular IgG Fc ligands are FcRn and Fc gamma receptors. By “Fc ligand” as used herein is meant a molecule, preferably a polypeptide, from any organism that binds to the Fc region of an antibody to form an Fc/Fc ligand complex.

[0170] By “Fc gamma receptor”, “FcγR” or “FcgammaR” as used herein is meant any member of the family of proteins that bind the IgG antibody Fc region and is encoded by an FcγR gene. In humans this family includes but is not limited to FcγRI (CD64), including isoforms FcγRIa, FcγRIb, and FcγRIc; FcγRII (CD32), including isoforms FcγRIIa (including allotypes H131 and R131), FcγRIIb (including FcγRIIb-1 and FcγRIIb-2), and FcγRIIc; and FcγRIII (CD16), including isoforms FcγRIIIa (including allotypes V158 and F158) and FcγRIIIb (including allotypes FcγRIIb-NA1 and FcγRIIb-NA2) (Jefferis et al., 2002, Immunol Lett 82:57-65, entirely incorporated by reference), as well as any undiscovered human FcγRs or FcγR isoforms or allotypes. An FcγR may be from any organism, including but not limited to humans, mice, rats, rabbits, and monkeys. Mouse FcγRs include but are not limited to FcγRI (CD64), FcγRII (CD32), FcγRIII (CD16), and FcγRIII-2 (CD16-2), as well as any undiscovered mouse FcγRs or FcγR isoforms or allotypes.

[0171] By “FcRn” or “neonatal Fc Receptor” as used herein is meant a protein that binds the IgG antibody Fc region and is encoded at least in part by an FcRn gene. The FcRn may be from any organism, including but not limited to humans, mice, rats, rabbits, and monkeys. As is known in the art, the functional FcRn protein comprises two polypeptides, often referred to as the heavy chain and light chain. The light chain is beta-2-microglobulin and the heavy chain is encoded by the FcRn gene. Unless otherwise noted herein, FcRn or an FcRn protein refers to the complex of FcRn heavy chain with beta-2-microglobulin. A variety of FcRn variants used to increase binding to the FcRn receptor, and in some cases, to increase serum half-life. An “FcRn variant” is an amino acid modification that contributes to increased binding to the FcRn receptor, and suitable FcRn variants are shown below.

[0172] By “parent polypeptide” as used herein is meant a starting polypeptide that is subsequently modified to generate a variant. The parent polypeptide may be a naturally occurring polypeptide, or a variant or engineered version of a naturally occurring polypeptide. Accordingly, by “parent immunoglobulin” as used herein is meant an unmodified immunoglobulin polypeptide that is modified to generate a variant, and by “parent antibody” as used herein is meant an unmodified antibody that is modified to generate a variant antibody. It should be noted that “parent antibody” includes known commercial, recombinantly produced antibodies as outlined below. In this context, a “parent Fc domain” will be relative to the recited variant; thus, a “variant human IgG1 Fc domain” is compared to the parent Fc domain of human IgG1, a “variant human IgG4 Fc domain” is compared to the parent Fc domain human IgG4, etc.

[0173] By “position” as used herein is meant a location in the sequence of a protein. Positions may be numbered sequentially, or according to an established format, for example the EU index for numbering of antibody domains (e.g., a CH1, CH2, CH3 or hinge domain).

[0174] By “target antigen” as used herein is meant the molecule that is bound specifically by the antigen binding domain comprising the variable regions of a given antibody.

[0175] By “strandedness” in the context of the monomers of the heterodimeric antibodies of the invention herein is meant that, similar to the two strands of DNA that “match”, heterodimerization variants are incorporated into each monomer so as to preserve the ability to “match” to form heterodimers. For example, if some pI variants are engineered into monomer A (e.g., making the pI higher) then steric variants that are “charge pairs” that can be utilized as well do not interfere with the pI variants, e.g., the charge variants that make a pI higher are put on the same “strand” or “monomer” to preserve both functionalities. Similarly, for “skew” variants that come in pairs of a set as more fully outlined below, the skilled artisan will consider pI in deciding into which strand or monomer one set of the pair will go, such that pI separation is maximized using the pI of the skews as well.

[0176] By “target cell” as used herein is meant a cell that expresses a target antigen.

[0177] By “host cell” in the context of producing a bispecific antibody according to the invention herein is meant a cell that contains the exogeneous nucleic acids encoding the components of the bispecific antibody and is capable of expressing the bispecific antibody under suitable conditions. Suitable host cells are discussed below.

[0178] By “wild type” or “WT” herein is meant an amino acid sequence or a nucleotide sequence that is found in nature, including allelic variations. A WT protein has an amino acid sequence or a nucleotide sequence that has not been intentionally modified.

[0179] Provided herein are a number of antibody domains (e.g., Fc domains) that have sequence identity to human antibody domains. Sequence identity between two similar sequences (e.g., antibody variable domains) can be measured by algorithms such as that of Smith, T. F. & Waterman, M. S. (1981) “Comparison Of Biosequences,” Adv. Appl. Math. 2:482 [local homology algorithm]; Needleman, S. B. & Wunsch, CD. (1970) “A General Method Applicable To The Search For Similarities In The Amino Acid Sequence Of Two Proteins,” J. Mol. Biol. 48:443 [homology alignment algorithm], Pearson, W. R. & Lipman, D. J. (1988) “Improved Tools For Biological Sequence Comparison,” Proc. Natl. Acad. Sci. (U.S.A.) 85:2444 [search for similarity method]; or Altschul, S. F. et al, (1990) “Basic Local Alignment Search Tool,” J. Mol. Biol. 215:403-10, the “BLAST” algorithm, see https://blast.ncbi.nlm.nih.gov/Blast.cgi. When using any of the aforementioned algorithms, the default parameters (for Window length, gap penalty, etc.) are used. In one embodiment, sequence identity is done using the BLAST algorithm, using default parameters

[0180] The antibodies of the present invention are generally isolated or recombinant. “Isolated,” when used to describe the various polypeptides disclosed herein, means a polypeptide that has been identified and separated and/or recovered from a cell or cell culture from which it was expressed. Ordinarily, an isolated polypeptide will be prepared by at least one purification step. An “isolated antibody,” refers to an antibody which is substantially free of other antibodies having different antigenic specificities. “Recombinant” means the antibodies are generated using recombinant nucleic acid techniques in exogeneous host cells, and they can be isolated as well.

[0181] “Specific binding” or “specifically binds to” or is “specific for” a particular antigen or an epitope means binding that is measurably different from a non-specific interaction. Specific binding can be measured, for example, by determining binding of a molecule compared to binding of a control molecule, which generally is a molecule of similar structure that does not have binding activity. For example, specific binding can be determined by competition with a control molecule that is similar to the target.

[0182] Specific binding for a particular antigen or an epitope can be exhibited, for example, by an antibody having a KD for an antigen or epitope of at least about 10⁻⁴ M, at least about 10⁻⁵ M, at least about 10⁻⁶ M, at least about 10⁻⁷ M, at least about 10⁻⁸ M, at least about 10⁻⁹ M, alternatively at least about 10⁻¹⁰ M, at least about 10⁻¹¹ M, at least about 10⁻¹² M, or greater, where KD refers to a dissociation rate of a particular antibody-antigen interaction. Typically, an antibody that specifically binds an antigen will have a KD that is 20-, 50-, 100-, 500-, 1000-, 5,000-, 10,000- or more times greater for a control molecule relative to the antigen or epitope.

[0183] Also, specific binding for a particular antigen or an epitope can be exhibited, for example, by an antibody having a KA or Ka for an antigen or epitope of at least 20-, 50-, 100-, 500-, 1000-, 5,000-, 10,000- or more times greater for the epitope relative to a control, where KA or Ka refers to an association rate of a particular antibody-antigen interaction. Binding affinity is generally measured using a Biacore, SPR or BLI assay.

### IV. PD-L1 and CD28 Antigen Binding Domains

[0184] Provided herein are antigen binding domains (ABDs) and ABD compositions that bind either PD-L1 or CD28. In some embodiments, one or more of the ABDs are included in an antibody format described herein including, for example, “1+1 Fab-scFv-Fc,” “2+1 Fab₂-scFv-Fc,” “2+1 mAb-scFv,” “1+1 common light chain,” and “2+1 common light chain” antibodies.

### A. PD-L1 Antigen Binding Domains

[0185] In one aspect, provided herein are PD-L1 antigen binding domains (ABDs) and compositions that include such PD-L1 antigen binding domains (ABDs), including anti-PD-L1 antibodies. Such PD-L1 binding domains and related antibodies (e.g., anti-PD-L1×anti-CD28 bispecific antibodies) find use, for example, in the treatment of PD-L1 associated cancers. In some embodiments, the PD-L1 ABDs are capable of binding to human and cynomolgus PD-L1 (see FIG. 2 and Example 2).

[0186] As will be appreciated by those in the art, suitable PD-L1 binding domains can comprise a set of 6 CDRs as depicted in FIGS. 28-31 and the Sequence Listing. Suitable PD-L1 ABDs can also include the entire VH and VL sequences as depicted in these sequences and FIGS. 28-31 and the Sequence Listing, used as scFvs or as Fab domains.

[0187] In one embodiment, the PD-L1 antigen binding domain includes the 6 CDRs (i.e., vhCDR1-3 and vlCDR1-3) of α PD-L1 ABD described herein, including FIGS. 28-31 and the Sequence Listing, either as the CDRs are underlined or, in the case where a different numbering scheme is used as described herein and as shown in Table 2, as the CDRs that are identified using other alignments within the variable heavy (VH) domain and variable light domain (VL) sequences of those depicted in FIGS. 28-31 and the Sequence Listing (see Table 2). Suitable PD-L1 ABDs can also include the entire VH and VL sequences as depicted in these sequences and figures, used as scFvs or as Fab domains. Additional anti-PD-L1 ABDs are shown in FIGS. 15, 73 and 78 of U.S. Pat. No. 10,793,632, as well as SEQ ID Nos:3961 to 4432 of that application, all of which sequences are incorporated herein by reference.

[0188] In one embodiment, the PD-L1 antigen binding domain includes the 6 CDRs (i.e., vhCDR1-3 and vlCDR1-3) of an PD-L1 ABD described herein, including FIGS. 28-31 and the Sequence Listing. In exemplary embodiments, the PD-L1 ABD is one of the following PD-L1 ABDs: 2G4[PDL1]_H1L1, 2G4[PDL1]_H1.12_L1.24, 2G4[PDL]_H1.12_L1.66, 2G4[PDL1]_H1.12_L1.68, 2G4[PDL1]_H1.12_L1.14, 2G4[PDL1]_H1.4_L1.23, 2G4[PDL1]_H1.4_L1.24, 2G4[PDL]_H1.9_L1, 2G4[PDL1]_H1.62_L1.63, 2G4[PDL1]_H1.6_L1.3, 2G4[PDL1]_H1.61_L1.61, 2G4[PDL1]_H1.60_L1.60, 2G4[PDL1]_H1.59_L1.60, 2G4[PDL]_H1.14_L1.26, 2G4[PDL]_H1_L1.27, 2G4[PDL1]_H1.8_L1.26, 2G4[PDL]_H1_L1.25, 2G4[PDL1]_H1.10_L1.23, 2G4[PDL1]_H1.1_L1.1, 2G4[PDL1]_H1_L1.29, 2.14H9 OPT, atezolizumab, avelumab, 12A4, 3G10, 10A5, h3D10 Var1, h3D10 Var2, h3D10 Var3, h3D10 Var4, h3D10 Var5, h3D10 Var6, h3D10 Var7, h3D10 Var8, h3D10 Var9, h3D10 Var10, h3D10 Var11, h3D10 Var12, h3D10 Var13, h3D10 Var14, Antibody A, C5H9v2, Humanized 29E.2A3, 1B9, 4H1, mAb-42, BAP058-03, BAP058-04, BAP058-06, BAP058-07, BAP058-11, BAP058-13, H6, RC5, SH1A1Q, SH1B3, SHID1, SH1D2, SH1D12, SH1E1, SH1G9, SH1E6, SH1A2, SH1B1, H6B1L, H6A1, H6B1, H6B2, G12, RSA1, RA3, SH1E2, SH1E4, SH1B11, SH1C8, H1H9364P2, H1H9373P2, H1H8314N, and PDL1.3.1 (FIGS. 28-31 and the Sequence Listing).

[0189] In addition to the parental CDR sets disclosed in the figures and sequence listing that form an ABD to PD-L1, provided herein are variant PD-L1 ABDS having CDRs that include at least one modification of the PD-L1 ABD CDRs disclosed herein. In one embodiment, the PD-L1 ABD includes a set of 6 CDRs with 1, 2, 3, 4, 5, 6, 7, 8, 9, 10 amino acid modifications as compared to the 6 CDRs of an PD-L1 ABD described herein, including the figures and sequence listing. In exemplary embodiments, the PD-L1 ABD includes a set of 6 CDRs with 1, 2, 3, 4, 5, 6, 7, 8, 9, 10 amino acid modifications as compared to the 6 CDRs of one of the following 2G4 ABDs: 2G4[PDL]_H11, 2G4[PDL1]_H1.12_L1.24, 2G4[PDL1]_H1.12_L1.66, 2G4[PDL]_H1.12_L1.68, 2G4[PDL]_H1.12_L1.14, 2G4[PDL1]_H1.4_L1.23, 2G4[PDL]_H1.4_L1.24, 2G4[PDL]_H1.9_L1, 2G4[PDL1]_H1.62_L1.63, 2G4[PDL]_H1.6_L1.3, 2G4[PDL]_H1.61_L1.61, 2G4[PDL1]_H1.60_L1.60, 2G4[PDL]_H1.59_L1.60, 2G4[PDL1]_H1.14_L1.26, 2G4[PDL1]_H1_L1.27, 2G4[PDL]_H1.8_L1.26, 2G4[PDL1]_H1_L1.25, 2G4[PDL1]_H1.10_L1.23, 2G4[PDL]_H1.1_L1.1, 2G4[PDL]_H1_L1.29, 2.14H9 OPT, atezolizumab, avelumab, 12A4, 3G10, 10A5, h3D10 Var1, h3D10 Var2, h3D10 Var3, h3D10 Var4, h3D10 Var5, h3D10 Var6, h3D10 Var7, h3D10 Var8, h3D10 Var9, h3D10 Var10, h3D10 Var11, h3D10 Var12, h3D10 Var13, h3D10 Var14, Antibody A, C5H9v2, Humanized 29E.2A3, 1B9, 4H1, mAb-42, BAP058-03, BAP058-04, BAP058-06, BAP058-07, BAP058-11, BAP058-13, H6, RC5, SH1A1Q, SH1B3, SH1D1, SH1D2, SH1D12, SH1E1, SH1G9, SH1E6, SH1A2, SH1B1, H6B1L, H6A1, H6B1, H6B2, G12, RSA1, RA3, SH1E2, SH1E4, SH1B11, SH1C8, H1H9364P2, H1H9373P2, H1H8314N, and PDL1.3.1 (FIGS. 28-31 and the Sequence Listing). In certain embodiments, the variant PD-L1 ABD is capable of binding PD-L1 antigen, as measured by at least one of a Biacore, surface plasmon resonance (SPR) and/or BLI (biolayer interferometry, e.g., Octet assay) assay, with the latter finding particular use in many embodiments. In particular embodiments, the PD-L1 ABD is capable of binding to human and cynomolgus PD-L1.

[0190] In one embodiment, the anti-PD-L1 ABD includes 6 CDRs that are at least 90, 95, 97, 98 or 99% identical to the 6 CDRs of an anti-PD-L1 ABD as described herein, including FIGS. 28-31 and the Sequence Listing. In exemplary embodiments, the anti-PD-L1 ABD includes 6 CDRs that are at least 90, 95, 97, 98 or 99% identical to the 6 CDRs of one of the following PD-L1 ABDs: 2G4[PDL1]_H1L1, 2G4[PDL1]_H1.12_L1.24, 2G4[PDL1]_H1.12_L1.66, 2G4[PDL1]_H1.12_L1.68, 2G4[PDL1]_H1.12_L1.14, 2G4[PDL1]_H1.4_L1.23, 2G4[PDL1]_H1.4_L1.24, 2G4[PDL1]_H1.9_L1, 2G4[PDL1]_H1.62_L1.63, 2G4[PDL1]_H1.6_L1.3, 2G4[PDL1]_H1.61_L1.61, 2G4[PDL1]_H1.60_L1.60, 2G4[PDL1]_H1.59_L1.60, 2G4[PDL]_H1.14_L1.26, 2G4[PDL1]_H1_L1.27, 2G4[PDL1]_H1.8_L1.26, 2G4[PDL1]_H1_L1.25, 2G4[PDL1]_H1.10_L1.23, 2G4[PDL1]_H1.1_L1.1, 2G4[PDL1]_H1_L1.29, 2.14H9 OPT, atezolizumab, avelumab, 12A4, 3G10, 10A5, h3D10 Var1, h3D10 Var2, h3D10 Var3, h3D10 Var4, h3D10 Var5, h3D10 Var6, h3D10 Var7, h3D10 Var8, h3D10 Var9, h3D10 Var10, h3D10 Var11, h3D10 Var12, h3D10 Var13, h3D10 Var14, Antibody A, C5H9v2, Humanized 29E.2A3, 1B9, 4H1, mAb-42, BAP058-03, BAP058-04, BAP058-06, BAP058-07, BAP058-11, BAP058-13, H6, RC5, SH1A1Q, SH1B3, SH1D1, SH1D2, SH1D12, SH1E1, SH1G9, SH1E6, SH1A2, SH1B1, H6B1L, H6A1, H6B1, H6B2, G12, RSA1, RA3, SH1E2, SH1E4, SH1B11, SH1C8, H1H9364P2, H1H9373P2, H1H8314N, and PDL1.3.1 (FIGS. 28-31 and the Sequence Listing). In certain embodiments, the anti-PD-L1 ABD is capable of binding to PD-L1 antigen, as measured by at least one of a Biacore, surface plasmon resonance (SPR) and/or BLI (biolayer interferometry, e.g., Octet assay) assay, with the latter finding particular use in many embodiments. In particular embodiments, the PD-L1 ABD is capable of binding to human and cynomolgus PD-L1.

[0191] In another exemplary embodiment, the anti-PD-L1 ABD include the variable heavy (VH) domain and/or variable light (VL) domain of any one of the PD-L1 ABDs described herein, including FIGS. 28-31 and the Sequence Listing. In exemplary embodiments, the anti-PD-L1 ABD is 2G4[PDL1]_H1L1, 2G4[PDL1]_H1.12_L1.24, 2G4[PDL1]_H1.12_L1.66, 2G4[PDL1]_H1.12_L1.68, 2G4[PDL1]_H1.12_L1.14, 2G4[PDL1]_H1.4_L1.23, 2G4[PDL1]_H1.4_L1.24, 2G4[PDL]_H1.9_L1, 2G4[PDL]_H1.62_L1.63, 2G4[PDL1]_H1.6_L1.3, 2G4[PDL1]_H1.61_L1.61, 2G4[PDL1]_H1.60_L1.60, 2G4[PDL1]_H1.59_L1.60, 2G4[PDL]_H1.14_L1.26, 2G4[PDL]_H1_L1.27, 2G4[PDL1]_H1.8_L1.26, 2G4[PDL]_H1_L1.25, 2G4[PDL1]_H1.10_L1.23, 2G4[PDL1]_H1.1_L1.1, 2G4[PDL1]_H1_L1.29, 2.14H9 OPT, atezolizumab, avelumab, 12A4, 3G10, 10A5, h3D10 Var1, h3D10 Var2, h3D10 Var3, h3D10 Var4, h3D10 Var5, h3D10 Var6, h3D10 Var7, h3D10 Var8, h3D10 Var9, h3D10 Var10, h3D10 Var11, h3D10 Var12, h3D10 Var13, h3D10 Var14, Antibody A, C5H9v2, Humanized 29E.2A3, 1B9, 4H1, mAb-42, BAP058-03, BAP058-04, BAP058-06, BAP058-07, BAP058-11, BAP058-13, H6, RC5, SH1A1Q, SH1B3, SH1D1, SH1D2, SH1D12, SH1E1, SH1G9, SH1E6, SH1A2, SH1B1, H6B1L, H6A1, H6B1, H6B2, G12, RSA1, RA3, SH1E2, SH1E4, SH1B11, SH1C8, H1H9364P2, H1H9373P2, H1H8314N, and PDL1.3.1 (FIGS. 28-31 and the Sequence Listing).

[0192] In some embodiments, the PD-L1 ABD includes one of the following PD-L1 ABD variable heavy domains: SEQ ID NO:1079, SEQ ID NO:1042, SEQ ID NO:1055, SEQ ID NO:1059, SEQ ID NO:1063, SEQ ID NO: 1067, SEQ ID NO: 1071, SEQ ID NO: 1075, SEQ ID NO:1083, SEQ ID NO:1087, SEQ ID NO:1091, SEQ ID NO:1095, and SEQ ID NO:1099, SEQ ID NOs:736-797.

[0193] In some embodiments, the PD-L1 ABD includes one of the following PD-L1 ABD variable light domains: SEQ ID NO:1111, SEQ ID NO:1046, SEQ ID NO: 1103, SEQ ID NO: 1107, SEQ ID NO: 1115, SEQ ID NO: 1119, SEQ ID NO: 1123, SEQ ID NO: 1127, SEQ ID NO:1131, SEQ ID NO: 1135, SEQ ID NO: 1139, SEQ ID NO: 1143, SEQ ID NO: 1147, SEQ ID NO:1151, SEQ ID NO: 1155, and SEQ ID NOs:798-868.

[0194] Any of the PD-L1 ABD variable heavy domain or variants thereof disclosed herein can be combined with any of the variable light domains or variants thereof described herein to form PD-L1 ABDs for use in any of the antibody formats provided herein.

[0195] In addition to the parental anti-PD-L1 binding domain variable heavy and variable light domains disclosed herein, provided herein are anti-PD-L1 ABDs that include a variable heavy domain and/or a variable light domain that are variants of an anti-PD-L1 ABD VH and VL domain disclosed herein. In one embodiment, the variant VH domain and/or VL domain has from 1, 2, 3, 4, 5, 6, 7, 8, 9 or 10 amino acid changes from a VH and/or VL domain of an anti-PD-L1 ABD described herein, including FIGS. 28-31 and the Sequence Listing. In exemplary embodiments, the variant VH domain and/or VL domain has from 1, 2, 3, 4, 5, 6, 7, 8, 9 or 10 amino acid changes from a VH and/or VL domain of one of the following 2G4 ABDs: 2G4[PDL1]_H1L1, 2G4[PDL1]_H1.12_L1.24, 2G4[PDL1]_H1.12_L1.66, 2G4[PDL1]_H1.12_L1.68, 2G4[PDL]_H1.12_L1.14, 2G4[PDL1]_H1.4_L1.23, 2G4[PDL1]_H1.4_L1.24, 2G4[PDL1]_H1.9_L1, 2G4[PDL1]_H1.62_L1.63, 2G4[PDL1]_H1.6_L1.3, 2G4[PDL1]_H1.61_L1.61, 2G4[PDL1]_H1.60_L1.60, 2G4[PDL1]_H1.59_L1.60, 2G4[PDL]_H1.14_L1.26, 2G4[PDL]_H1_L1.27, 2G4[PDL1]_H1.8_L1.26, 2G4[PDL]_H1_L1.25, 2G4[PDL1]_H1.10_L1.23, 2G4[PDL1]_H1.1_L1.1, 2G4[PDL1]_H1_L1.29, 2.14H9 OPT, atezolizumab, avelumab, 12A4, 3G10, 10A5, h3D10 Var1, h3D10 Var2, h3D10 Var3, h3D10 Var4, h3D10 Var5, h3D10 Var6, h3D10 Var7, h3D10 Var8, h3D10 Var9, h3D10 Var10, h3D10 Var11, h3D10 Var12, h3D10 Var13, h3D10 Var14, Antibody A, C5H9v2, Humanized 29E.2A3, 1B9, 4H1, mAb-42, BAP058-03, BAP058-04, BAP058-06, BAP058-07, BAP058-11, BAP058-13, H6, RC5, SH1A1Q, SH1B3, SH1D1, SH1D2, SH1D12, SH1E1, SH1G9, SH1E6, SH1A2, SH1B1, H6B1L, H6A1, H6B1, H6B2, G12, RSA1, RA3, SH1E2, SH1E4, SH1B11, SH1C8, H1H9364P2, H1H9373P2, H1H8314N, and PDL1.3.1 (FIGS. 28-31 and the Sequence Listing). In certain embodiments, the anti-PD-L1 ABD is capable of binding to PD-L1, as measured at least one of a Biacore, surface plasmon resonance (SPR) and/or BLI (biolayer interferometry, e.g., Octet assay) assay, with the latter finding particular use in many embodiments. In particular embodiments, the PD-L1 ABD is capable of binding to human and cynomolgus PD-L1.

[0196] In some embodiments, the PD-L1 ABD includes a variable heavy domain that has from 1, 2, 3, 4, 5, 6, 7, 8, 9 or 10 amino acid changes one of the following PD-L1 ABD variable heavy domains: SEQ ID NO:1079, SEQ ID NO:1042, SEQ ID NO:1055, SEQ ID NO:1059, SEQ ID NO:1063, SEQ ID NO: 1067, SEQ ID NO: 1071, SEQ ID NO: 1075, SEQ ID NO:1083, SEQ ID NO:1087, SEQ ID NO:1091, SEQ ID NO:1095, and SEQ ID NO:1099, SEQ ID NOs:736-797. In some embodiments, the PD-L1 ABD includes any of the variable light domains provided herein or a variant thereof.

[0197] In some embodiments, the PD-L1 ABD includes a variable light domain that has from 1, 2, 3, 4, 5, 6, 7, 8, 9 or 10 amino acid changes one of the following PD-L1 ABD variable light domains: SEQ ID NO:1111, SEQ ID NO:1046, SEQ ID NO: 1103, SEQ ID NO: 1107, SEQ ID NO: 1115, SEQ ID NO: 1119, SEQ ID NO: 1123, SEQ ID NO: 1127, SEQ ID NO:1131, SEQ ID NO: 1135, SEQ ID NO: 1139, SEQ ID NO: 1143, SEQ ID NO: 1147, SEQ ID NO:1151, SEQ ID NO:1155, and SEQ ID NOs:798-868. In some embodiments, the PD-L1 ABD includes any of the variable heavy domains provided herein or a variant thereof.

[0198] In one embodiment, the variant VH and/or VL domain is at least 90, 95, 97, 98 or 99% identical to the VH and/or VL of an anti-PD-L1 ABD as described herein, including FIGS. 28-31 and the Sequence Listing. In exemplary embodiments, the variant VH and/or VL domain is at least 90, 95, 97, 98 or 99% identical to the VH and/or VL of one of the following 2G4 ABDs: 2G4[PDL1]_H1L1, 2G4[PDL]_H1.12_L1.24, 2G4[PDL]_H1.12_L1.66, 2G4[PDL1]_H1.12_L1.68, 2G4[PDL1]_H1.12_L1.14, 2G4[PDL]_H1.4_L1.23, 2G4[PDL1]_H1.4_L1.24, 2G4[PDL]_H1.9_L1, 2G4[PDL1]_H1.62_L1.63, 2G4[PDL1]_H1.6_L1.3, 2G4[PDL]_H1.61_L1.61, 2G4[PDL]_H1.60_L1.60, 2G4[PDL1]_H1.59_L1.60, 2G4[PDL1]_H1.14_L1.26, 2G4[PDL1]_H1_L1.27, 2G4[PDL1]_H1.8_L1.26, 2G4[PDL1]_H1_L1.25, 2G4[PDL1]_H1.10_L1.23, 2G4[PDL1]_H1.1_L1.1, 2G4[PDL1]_H1_L1.29, 2.14H9 OPT, atezolizumab, avelumab, 12A4, 3G10, 10A5, h3D10 Var1, h3D10 Var2, h3D10 Var3, h3D10 Var4, h3D10 Var5, h3D10 Var6, h3D10 Var7, h3D10 Var8, h3D10 Var9, h3D10 Var10, h3D10 Var11, h3D10 Var12, h3D10 Var13, h3D10 Var14, Antibody A, C5H9v2, Humanized 29E.2A3, 1B9, 4H1, mAb-42, BAP058-03, BAP058-04, BAP058-06, BAP058-07, BAP058-11, BAP058-13, H6, RC5, SH1A1Q, SH1B3, SHID, SH1D2, SH1D12, SH1E1, SH1G9, SH1E6, SH1A2, SH1B1, H6B1L, H6A1, H6B1, H6B2, G12, RSA1, RA3, SH1E2, SH1E4, SH1B11, SH1C8, H1H9364P2, H1H9373P2, H1H8314N, and PDL1.3.1 (FIGS. 28-31 and the Sequence Listing). In certain embodiments, the anti-PD-L1 ABD is capable of binding to PD-L1, as measured by at least one of a Biacore, surface plasmon resonance (SPR) and/or BLI (biolayer interferometry, e.g., Octet assay) assay, with the latter finding particular use in many embodiments. In particular embodiments, the PD-L1 ABD is capable of binding to human and cynomolgus PD-L1.

[0199] In some embodiments, the PD-L1 ABD includes a variable heavy domain that is at least 90, 95, 97, 98 or 99% identical to one of the following PD-L1 ABD variable heavy domains: SEQ ID NO:1079, SEQ ID NO:1042, SEQ ID NO:1055, SEQ ID NO:1059, SEQ ID NO:1063, SEQ ID NO: 1067, SEQ ID NO: 1071, SEQ ID NO: 1075, SEQ ID NO:1083, SEQ ID NO:1087, SEQ ID NO:1091, SEQ ID NO:1095, and SEQ ID NO:1099, SEQ ID NOs:736-797. In some embodiments, the PD-L1 ABD includes any of the variable light domains provided herein or a variant thereof.

[0200] In some embodiments, the PD-L1 ABD includes a variable light domain that is at least 90, 95, 97, 98 or 99% identical to one of the following PD-L1 ABD variable light domains: SEQ ID NO:1111, SEQ ID NO:1046, SEQ ID NO: 1103, SEQ ID NO: 1107, SEQ ID NO: 1115, SEQ ID NO: 1119, SEQ ID NO: 1123, SEQ ID NO: 1127, SEQ ID NO:1131, SEQ ID NO: 1135, SEQ ID NO: 1139, SEQ ID NO: 1143, SEQ ID NO: 1147, SEQ ID NO:1151, SEQ ID NO: 1155, and SEQ ID NOs:798-868. In some embodiments, the PD-L1 ABD includes any of the variable heavy domains provided herein or a variant thereof.

[0201] In some embodiments, the PD-L1 ABDs have variable heavy and variable light domains that are 90, 95, 97, 98 or 99% identical to the VH and/or VL domains of α PD-L1 ABD as described herein, but the CDRs are identical. In some embodiments, the VH selected from the group consisting of: SEQ ID NO:1079, SEQ ID NO:1042, SEQ ID NO:1055, SEQ ID NO: 1059, SEQ ID NO:1063, SEQ ID NO: 1067, SEQ ID NO: 1071, SEQ ID NO: 1075, SEQ ID NO:1083, SEQ ID NO:1087, SEQ ID NO:1091, SEQ ID NO:1095, and SEQ ID NO:1099, SEQ ID NOs:736-797. In some embodiments, the VL is selected from the group consisting of: SEQ ID NO:1111, SEQ ID NO:1046, SEQ ID NO: 1103, SEQ ID NO: 1107, SEQ ID NO: 1115, SEQ ID NO: 1119, SEQ ID NO: 1123, SEQ ID NO: 1127, SEQ ID NO:1131, SEQ ID NO: 1135, SEQ ID NO: 1139, SEQ ID NO: 1143, SEQ ID NO: 1147, SEQ ID NO:1151, SEQ ID NO: 1155, and SEQ ID NOs:798-868.

[0202] In some embodiments, the PD-L1 ABDs have variable heavy and variable light domains that are 90, 95, 97, 98 or 99% identical to the VH and/or VL domains of α PD-L1 ABD as described herein, and there can be from 0 to 6 amino acid modifications in the CDRs. In some embodiments, the VH selected from the group consisting of: SEQ ID NO:1079, SEQ ID NO:1042, SEQ ID NO:1055, SEQ ID NO:1059, SEQ ID NO:1063, SEQ ID NO: 1067, SEQ ID NO: 1071, SEQ ID NO: 1075, SEQ ID NO:1083, SEQ ID NO:1087, SEQ ID NO:1091, SEQ ID NO:1095, and SEQ ID NO:1099, SEQ ID NOs:736-797. In some embodiments, the VL is selected from the group consisting of: SEQ ID NO:1111, SEQ ID NO:1046, SEQ ID NO: 1103, SEQ ID NO:1107, SEQ ID NO:1115, SEQ ID NO:1119, SEQ ID NO:1123, SEQ ID NO:1127, SEQ ID NO:1131, SEQ ID NO: 1135, SEQ ID NO: 1139, SEQ ID NO: 1143, SEQ ID NO: 1147, SEQ ID NO:1151, SEQ ID NO: 1155, and SEQ ID NOs:798-868.

[0203] In some embodiments, the PD-L1 ABDs have variable heavy and variable light domains that are 90, 95, 97, 98 or 99% identical to the VH and/or VL domains of α PD-L1 ABD as described herein, and there can be from 0 to 6 amino acid modifications in the CDRs, with no CDR having more than 1 amino acid modification. In some embodiments, the VH selected from the group consisting of: SEQ ID NO:1079, SEQ ID NO:1042, SEQ ID NO:1055, SEQ ID NO:1059, SEQ ID NO:1063, SEQ ID NO: 1067, SEQ ID NO: 1071, SEQ ID NO: 1075, SEQ ID NO:1083, SEQ ID NO:1087, SEQ ID NO:1091, SEQ ID NO:1095, and SEQ ID NO:1099, SEQ ID NOs:736-797. In some embodiments, the VL is selected from the group consisting of: SEQ ID NO:1111, SEQ ID NO:1046, SEQ ID NO: 1103, SEQ ID NO: 1107, SEQ ID NO: 1115, SEQ ID NO: 1119, SEQ ID NO: 1123, SEQ ID NO: 1127, SEQ ID NO:1131, SEQ ID NO: 1135, SEQ ID NO: 1139, SEQ ID NO: 1143, SEQ ID NO: 1147, SEQ ID NO:1151, SEQ ID NO: 1155, and SEQ ID NOs:798-868.

[0204] In some embodiments, the PD-L1 antigen binding domain includes a variable heavy domain (VH) and a variable light domain (VL) selected from the group consisting of: a VH having an amino acid sequence of SEQ ID NO:1183 and a VL having an amino acid sequence of SEQ ID NO:1187; a VH having an amino acid sequence of SEQ ID NO:1042 and a VL having an amino acid sequence of SEQ ID NO:1047; a VH having an amino acid sequence of SEQ ID NO:1159 and a VL having an amino acid sequence of SEQ ID NO:1163; a VH having an amino acid sequence of SEQ ID NO:1167 and a VL having an amino acid sequence of SEQ ID NO:1171; a VH having an amino acid sequence of SEQ ID NO:1175 and a VL having an amino acid sequence of SEQ ID NO:1179; a VH having an amino acid sequence of SEQ ID NO: 1191 and a VL having an amino acid sequence of SEQ ID NO: 1195; a VH having an amino acid sequence of SEQ ID NO:1199 and a VL having an amino acid sequence of SEQ ID NO:1203; a VH having an amino acid sequence of SEQ ID NO:1207 and a VL having an amino acid sequence of SEQ ID NO:1211; a VH having an amino acid sequence of SEQ ID NO:1215 and a VL having an amino acid sequence of SEQ ID NO:1219; a VH having an amino acid sequence of SEQ ID NO:1223 and a VL having an amino acid sequence of SEQ ID NO:1227; a VH having an amino acid sequence of SEQ ID NO:1231 and a VL having an amino acid sequence of SEQ ID NO:1235; a VH having an amino acid sequence of SEQ ID NO:1239 and a VL having an amino acid sequence of SEQ ID NO:1243; a VH having an amino acid sequence of SEQ ID NO:1247 and a VL having an amino acid sequence of SEQ ID NO:1251; a VH having an amino acid sequence of SEQ ID NO:1255 and a VL having an amino acid sequence of SEQ ID NO:1259; a VH having an amino acid sequence of SEQ ID NO:1263 and a VL having an amino acid sequence of SEQ ID NO:1267; a VH having an amino acid sequence of SEQ ID NO:1271 and a VL having an amino acid sequence of SEQ ID NO:1275; a VH having an amino acid sequence of SEQ ID NO:1279 and a VL having an amino acid sequence of SEQ ID NO:1283; a VH having an amino acid sequence of SEQ ID NO:1287 and a VL having an amino acid sequence of SEQ ID NO:1291; a VH having an amino acid sequence of SEQ ID NO:1295 and a VL having an amino acid sequence of SEQ ID NO:1299; and a VH having an amino acid sequence of SEQ ID NO:1303 and a VL having an amino acid sequence of SEQ ID NO:1307.

[0205] In certain embodiments, the PD-L1 ABD is capable of binding to the PD-L1, as measured by at least one of a Biacore, surface plasmon resonance (SPR) and/or BLI (biolayer interferometry, e.g., Octet assay) assay, with the latter finding particular use in many embodiments. In particular embodiments, the CD28 ABD is capable of binding human PD-L1 (see FIG. 2) at detectable limits of the assay.

[0206] In some embodiments, the PD-L1 antigen binding domain provided herein includes one or more of the sequences depicted in FIG. 71. In some embodiments, the PD-L1 antigen binding domain includes at least one of the HCDR1-3 and/or LCDR1-3 sequences of FIG. 71. In some embodiments, the PD-L1 antigen binding domain includes at least one of the HFR1-4 and/or LFR1-4 sequences of FIG. 71.

[0207] Such PD-L1 binding domains can be included in any of the antibodies provided herein including, for example, “1+1 Fab-scFv-Fc,” “2+1 Fab₂-scFv-Fc,” “2+1 mAb-scFv,” “1+1 common light chain,” and “2+1 common light chain” antibodies. B. CD28 Antigen Binding Domains

[0208] In one aspect, provided herein are CD28 antigen binding domains (ABDs) and compositions that include such CD28 antigen binding domains (e.g., antibodies, including the heterodimeric antibodies provided herein). In some embodiments, the CD28 antigen binding domain described herein are agonistic CD28 ABDs that advantageously provide costimulatory activity. Thus, such CD28 ABDs provided herein are useful of enhancing immune responses, for example, when used in combination with other therapeutics (e.g., anti-cancer therapeutics for the treatment of particular cancers).

[0209] As will be appreciated by those in the art, suitable CD28 binding domains can comprise a set of 6 CDRs as depicted in the Sequence Listing and Figures, either as they are underlined or, in the case where a different numbering scheme is used as described herein and as shown in Table 2, as the CDRs that are identified using other alignments within the variable heavy (VH) domain and variable light domain (VL) sequences of those depicted in FIGS. 18-23 and the Sequence Listing. Suitable CD28 ABDs can also include the entire VH and VL sequences as depicted in these sequences and figures, used as scFvs or as Fabs.

[0210] In one embodiment, the CD28 antigen binding domain includes the 6 CDRs (i.e., vhCDR1-3 and vlCDR1-3) of any of the CD28 binding domains described herein, including the Figures and Sequence Listing. In some embodiments, the CD28 ABD is one of the following CD28 ABDs:

[0211] In exemplary embodiments, the CD28 ABD is one of the following CD28 ABDs: 1A7[CD28]_H1L1, 1A7[CD28]_H1.14L1, 1A7[CD28]_L1H1.14, 1A7[CD28]_H1.1L1, 1A7[CD28]_H1L1.71, 1A7[CD28]_H1.14L1.71, 1A7[CD28]_L1.71H1.14, 1A7[CD28]_H1.1L1.71, and HuTN228[CD28]_H1L1 (FIGS. 18-23 and the Sequence Listing).

[0212] In addition to the parental CDR sets disclosed in the figures and sequence listing that form an ABD to CD28, provided herein are variant CD28 ABDS having CDRs that include at least one modification of the CD28 ABD CDRs disclosed herein (e.g., FIGS. 18-23 or the Sequence Listing). In one embodiment, the CD28 ABD includes a set of 6 CDRs with 1, 2, 3, 4, 5, 6, 7, 8, 9, 10 amino acid modifications as compared to the 6 CDRs of a CD28 ABD as described herein, including the figures and sequence listing. In exemplary embodiments, the CD28 ABD includes a set of 6 CDRs with 1, 2, 3, 4, 5, 6, 7, 8, 9, 10 amino acid modifications as compared to the 6 CDRs of one of the following CD28 ABDs: 1A7[CD28]_H1L1, 1A7[CD28]_H1.14L1, 1A7[CD28]_L1H1.14, 1A7[CD28]_H1.1L1, 1A7[CD28]_H1L1.71, 1A7[CD28]_H1.14L1.71, 1A7[CD28]_L1.71H1.14, 1A7[CD28]_H1.1L1.71, HuTN228[CD28]_H1L1, CD28.3[CD28]_H0L0, hCD28.3[CD28]_H1L1, 5.11A1[CD28]_H0L0, TGN1412_H1L1, 341VL34[CD28]_H1L1, 341VL36[CD28]_H1L1, 281VL4[CD28]_H1L1, PV1[CD28]_H0L0, m9.3[CD28]_H0L0, and hu9.3[CD28]_H1L1 or a variant thereof (FIGS. 18-23 and the Sequence Listing).

[0213] In certain embodiments, the CD28 ABD is capable of binding CD28 antigen, as measured by at least one of a Biacore, surface plasmon resonance (SPR) and/or BLI (biolayer interferometry, e.g., Octet assay) assay, with the latter finding particular use in many embodiments. In particular embodiments, the CD28 ABD is capable of binding human CD28 antigen (see FIG. 1).

[0214] In some embodiments, the CD28 ABD includes variable heavy and variable light domains that are at least 90, 95, 97, 98 or 99% identical to the VH and VL domains of a CD28 ABD as described herein, including the figures and sequence listing. In exemplary embodiments, the CD28 ABD includes VH and VL domains that are at least 90, 95, 97, 98 or 99% identical to the 6 CDRs of one of the following CD28 ABDs: 1A7[CD28]_H1L1, 1A7[CD28]_H1.14L1, 1A7[CD28]_L1H1.14, 1A7[CD28]_H1.1L1, 1A7[CD28]_H1L1.71, 1A7[CD28]_H1.14L1.71, 1A7[CD28]_L1.71H1.14, 1A7[CD28]_H1.1L1.71, HuTN228[CD28]_H1L1, CD28.3[CD28]_H0L0, hCD28.3[CD28]_H1L1, 5.11A1[CD28]_H0L0, TGN1412_H1L1, 341VL34[CD28]_H1L1, 341VL36[CD28]_H1L1, 281VL4[CD28]_H1L1, PV1[CD28]_H0L0, m9.3[CD28]_H0L0, and hu9.3[CD28]_H1L1 or a variant thereof (FIGS. 18-23 and the Sequence Listing). In some embodiments, the VH selected from the group consisting of: SEQ ID NO:998, SEQ ID NO:984, SEQ ID NO:994 and SEQ ID NOs:561-629. In some embodiments, the VL is selected from the group consisting of: SEQ ID NO:1002, SEQ ID NO:984, and SEQ ID Nos:630-735 or a variant thereof.

[0215] In some embodiments, the CD28 ABDs have variable heavy and variable light domains that are 90, 95, 97, 98 or 99% identical to the VH and/or VL domains of a CD28 ABD as described herein, but the CDRs are identical. In some embodiments, the VH selected from the group consisting of: SEQ ID NO:998, SEQ ID NO:984, SEQ ID NO:994 and SEQ ID NOs:561-629. In some embodiments, the VL is selected from the group consisting of: SEQ ID NO:1002, SEQ ID NO:984, and SEQ ID Nos:630-735 or a variant thereof.

[0216] In some embodiments, the CD28 ABDs have variable heavy and variable light domains that are 90, 95, 97, 98 or 99% identical to the VH and/or VL domains of a CD28 ABD as described herein, and there can be from 0 to 6 amino acid modifications in the CDRs. In some embodiments, the VH selected from the group consisting of: SEQ ID NO:998, SEQ ID NO:984, SEQ ID NO:994 and SEQ ID NOs:561-629. In some embodiments, the VL is selected from the group consisting of: SEQ ID NO:1002, SEQ ID NO:984, and SEQ ID Nos:630-735 or a variant thereof.

[0217] In some embodiments, the CD28 ABDs have variable heavy and variable light domains that are 90, 95, 97, 98 or 99% identical to the VH and/or VL domains of a CD28 ABD as described herein, and there can be from 0 to 6 amino acid modifications in the CDRs, with no CDR having more than 1 amino acid modification. In some embodiments, the VH selected from the group consisting of: SEQ ID NO:998, SEQ ID NO:984, SEQ ID NO:994 and SEQ ID NOs:561-629. In some embodiments, the VL is selected from the group consisting of: SEQ ID NO:1002, SEQ ID NO:984, and SEQ ID Nos:630-735 or a variant thereof.

[0218] In certain embodiments, the CD28 ABD is capable of binding to the CD28, as measured by at least one of a Biacore, surface plasmon resonance (SPR) and/or BLI (biolayer interferometry, e.g., Octet assay) assay, with the latter finding particular use in many embodiments. In particular embodiments, the CD28 ABD is capable of binding human CD28 antigen (see FIG. 1) at detectable limits of the assay.

[0219] In another exemplary embodiment, the CD28 ABD include the variable heavy (VH) domain and/or variable light (VL) domain of any one of the CD28 ABDs described herein, including the figures and sequence listing. In exemplary embodiments, the CD28 ABD is one of the following CD28 ABDs: 1A7[CD28]_H1L1, 1A7[CD28]_H1.14L1, 1A7[CD28]_L1H1.14, 1A7[CD28]_H1.1L1, 1A7[CD28]_H1L1.71, 1A7[CD28]_H1.14L1.71, 1A7[CD28]_L1.71H1.14, 1A7[CD28]_H1.1L1.71, HuTN228[CD28]_H1L1, CD28.3[CD28]_H0L0, hCD28.3[CD28]_H1L1, 5.11 A1[CD28]_H0L0, TGN1412_H11, 341VL34[CD28]_H1L1, 341VL36[CD28]_H1L1, 281VL4[CD28]_H1L1, PV1[CD28]_H0L0, m9.3[CD28]_H0L0, and hu9.3[CD28]_H1L1 or a variant thereof (FIGS. 18-23 and the Sequence Listing). Any of the CD28 ABD variable heavy domains or variants thereof disclosed herein can be combined with any of the variable light domains or variants thereof described herein to form CD28 ABDs for use in any of the antibody formats provided herein.

[0220] In addition to the parental CD28 variable heavy and variable light domains disclosed herein, provided herein are CD28 ABDs that include a variable heavy domain and/or a variable light domain that are variants of a CD28 ABD VH and VL domain disclosed herein. In one embodiment, the variant VH domain and/or VL domain has from 1, 2, 3, 4, 5, 6, 7, 8, 9 or 10 amino acid changes from a VH and/or VL domain of a CD28 ABD described herein, including the figures and sequence listing. In exemplary embodiments, the variant VH domain and/or VL domain has from 1, 2, 3, 4, 5, 6, 7, 8, 9 or 10 amino acid changes from a VH and/or VL domain of one of the following CD28 ABDs: 1A7[CD28]_H1L1, 1A7[CD28]_H1.14L1, 1A7[CD28]_L1H1.14, 1A7[CD28]_H1.1L1, 1A7[CD28]_H1L1.71, 1A7[CD28]_H1.14L1.71, 1A7[CD28]_L1.71H1.14, 1A7[CD28]_H1.1L1.71, and HuTN228[CD28]_H1L1, CD28.3[CD28]_H0L0, hCD28.3[CD28]_H1L1, 5.11 A1[CD28]_H0L0, TGN1412_H11, 341VL34[CD28]_H1L1, 341VL36[CD28]_H1L1, 281VL4[CD28]_H1L1, PV1[CD28]_H0L0, m9.3[CD28]_H0L0, and hu9.3[CD28]_H1L1 or a variant thereof (FIGS. 18-23 and the Sequence Listing). In certain embodiments, the CD28 ABD is capable of binding to CD28, as measured at least one of a Biacore, surface plasmon resonance (SPR) and/or BLI (biolayer interferometry, e.g., Octet assay) assay, with the latter finding particular use in many embodiments. In particular embodiments, the CD28 ABD is capable of binding human CD28 antigen (see FIG. 1).

[0221] In one embodiment, the variant VH and/or VL domain is at least 90, 95, 97, 98 or 99% identical to the VH and/or VL of a CD28 ABD as described herein, including the figures and sequence listing. In exemplary embodiments, the variant VH and/or VL domain is at least 90, 95, 97, 98 or 99% identical to the VH and/or VL of one of the following CD28 ABDs: 1A7[CD28]_H1L1, 1A7[CD28]_H1.14L1, 1A7[CD28]_L1H1.14, 1A7[CD28]_H1.1L1, 1A7[CD28]_H1L1.71, 1A7[CD28]_H1.14L1.71, 1A7[CD28]_L1.71H1.14, 1A7[CD28]_H1.1L1.71, HuTN228[CD28]_H1L1, CD28.3[CD28]_H0L0, hCD28.3[CD28]_H1L1, 5.11A1[CD28]_H0L0, TGN1412_H1L1, 341VL34[CD28]_H1L1, 341VL36[CD28]_H1L1, 281VL4[CD28]_H1L1, PV1[CD28]_H0L0, m9.3[CD28]_H0L0, and hu9.3[CD28]_H1L1 or a variant thereof (FIGS. 18-23 and the Sequence Listing). In certain embodiments, the CD28 ABD is capable of binding to CD28, as measured by at least one of a Biacore, surface plasmon resonance (SPR) and/or BLI (biolayer interferometry, e.g., Octet assay) assay, with the latter finding particular use in many embodiments. In particular embodiments, the CD28 ABD is capable of binding human CD28 antigen (see FIG. 1).

[0222] In one embodiment, the CD28 antigen binding domain includes a variable heavy domain (VH) having the vhCDR1-3 (i.e., vhCDR1-3) of 1A7_H1.14 (FIG. 19). In some embodiments, the CD28 antigen binding domain further includes any of the CD28 binding domain variable light domains provided herein. In exemplary embodiments, the variable light domain is 1A7_L1.71 (FIG. 20) or a variant thereof. In certain embodiments, the CD28 ABD is capable of binding CD28 antigen, as measured by at least one of a Biacore, surface plasmon resonance (SPR) and/or BLI (biolayer interferometry, e.g., Octet assay) assay, with the latter finding particular use in many embodiments. In particular embodiments, the CD28 ABD is capable of binding human CD28 antigen (see FIG. 1). Such CD28 binding domains can be included in any of the antibodies provided herein including, for example, “1+1 Fab-scFv-Fc,” “2+1 Fab2-scFv-Fc,” “2+1 mAb-scFv,” “1+1 common light chain,” and “2+1 common light chain” antibodies.

[0223] In one embodiment, the CD28 ABD includes a variable heavy domain (VH) having vhCDR1-3s with 1, 2, 3, 4, 5, 6, 7, 8, 9, 10 amino acid modifications as compared to the vhCDR1-3 of 1A7_H1.14 (FIG. 19). In some embodiments, the CD28 antigen binding domain further includes any of the CD28 binding domain variable light domains provided herein. In exemplary embodiments, the variable light domain is 1A7_L1.71 (FIG. 20) or a variant thereof. In certain embodiments, the CD28 ABD is capable of binding CD28 antigen, as measured by at least one of a Biacore, surface plasmon resonance (SPR) and/or BLI (biolayer interferometry, e.g., Octet assay) assay, with the latter finding particular use in many embodiments. In particular embodiments, the CD28 ABD is capable of binding human CD28 antigen (see FIG. 1). Such CD28 binding domains can be included in any of the antibodies provided herein including, for example, “1+1 Fab-scFv-Fc,” “2+1 Fab2-scFv-Fc,” “2+1 mAb-scFv,” “1+1 common light chain,” and “2+1 common light chain” antibodies.

[0224] In some embodiments, the CD28 ABD includes a variable heavy domain (VH) having vhCDR1-3s that are at least 90, 95, 97, 98 or 99% identical to the 6 vhCDR1-3 of 1A7_H1.14 (FIG. 19). In some embodiments, the CD28 antigen binding domain further includes any of the CD28 binding domain variable light domains provided herein. In exemplary embodiments, the variable light domain is 1A7_L1.71 (FIG. 20) or a variant thereof. In certain embodiments, the CD28 ABD is capable of binding to the CD28, as measured by at least one of a Biacore, surface plasmon resonance (SPR) and/or BLI (biolayer interferometry, e.g., Octet assay) assay, with the latter finding particular use in many embodiments. In particular embodiments, the CD28 ABD is capable of binding human CD28 antigen (see FIG. 1). Such CD28 binding domains can be included in any of the antibodies provided herein including, for example, “1+1 Fab-scFv-Fc,” “2+1 Fab₂-scFv-Fc,” “2+1 mAb-scFv,” “1+1 common light chain,” and “2+1 common light chain” antibodies.

[0225] In another exemplary embodiment, the CD28 ABD include the variable heavy (VH) domain 1A7_H1.14 (FIG. 19). In some embodiments, the CD28 antigen binding domain further includes any of the CD28 binding domain variable light domains provided herein. In exemplary embodiments, the variable light domain is 1A7_L1.14 (FIG. 20) or a variant thereof. In certain embodiments, the CD28 ABD is capable of binding to the CD28, as measured by at least one of a Biacore, surface plasmon resonance (SPR) and/or BLI (biolayer interferometry, e.g., Octet assay) assay, with the latter finding particular use in many embodiments. In particular embodiments, the CD28 ABD is capable of binding human CD28 antigen (see FIG. 1). Such CD28 binding domains can be included in any of the antibodies provided herein including, for example, “1+1 Fab-scFv-Fc,” “2+1 Fab₂-scFv-Fc,” “2+1 mAb-scFv,” “1+1 common light chain,” and “2+1 common light chain” antibodies.

[0226] In addition to the parental CD28 variable heavy domains disclosed herein, provided herein are CD28 ABDs that include a variable heavy domain that is a variant of 1A7_H1.14 (FIG. 19). In one embodiment, the variant VH domain has from 1, 2, 3, 4, 5, 6, 7, 8, 9 or 10 amino acid changes from 1A7_H1.14 (FIG. 19). In some embodiments, the CD28 antigen binding domain further includes any of the CD28 binding domain variable light domains provided herein. In exemplary embodiments, the variable light domain is 1A7_L1.71 (FIG. 20) or a variant thereof. In certain embodiments, the CD28 ABD is capable of binding to CD28, as measured at least one of a Biacore, surface plasmon resonance (SPR) and/or BLI (biolayer interferometry, e.g., Octet assay) assay, with the latter finding particular use in many embodiments. In particular embodiments, the CD28 ABD is capable of binding human CD28 antigen (see FIG. 1). Such CD28 binding domains can be included in any of the antibodies provided herein including, for example, “1+1 Fab-scFv-Fc,” “2+1 Fab₂-scFv-Fc,” “2+1 mAb-scFv,” “1+1 common light chain,” and “2+1 common light chain” antibodies.

[0227] In one embodiment, the variant VH domain is at least 90, 95, 97, 98 or 99% identical to 1A7_H1.14 (FIG. 19). In some embodiments, the CD28 antigen binding domain further includes any of the CD28 binding domain variable light domains provided herein. In exemplary embodiments, the variable light domain is 1A7_L1.71 (FIG. 20) or a variant thereof. In certain embodiments, the CD28 ABD is capable of binding to CD28, as measured by at least one of a Biacore, surface plasmon resonance (SPR) and/or BLI (biolayer interferometry, e.g., Octet assay) assay, with the latter finding particular use in many embodiments. In particular embodiments, the CD28 ABD is capable of binding human CD28 antigen (see FIG. 1). Such CD28 binding domains can be included in any of the antibodies provided herein including, for example, “1+1 Fab-scFv-Fc,” “2+1 Fab₂-scFv-Fc,” “2+1 mAb-scFv,” “1+1 common light chain,” and “2+1 common light chain” antibodies.

[0228] In some embodiments, the CD28 antigen binding domain provided herein includes one or more of the sequences depicted in FIG. 70. In some embodiments, the CD28 antigen binding domain includes at least one of the HCDR1-3 and/or LCDR1-3 sequences of FIG. 70. In some embodiments, the CD28 antigen binding domain includes at least one of the HFR1-4 and/or LFR1-4 sequences of FIG. 70.

[0229] Specific anti-CD28 ABDs of interest include a VH domain with an amino acid sequence selected from the group consisting of SEQ ID NO:998, SEQ ID NO:984, SEQ ID NO:994 and SEQ ID NOs:561-629 or a variant thereof, paired with a VL domain of SEQ ID NO:1002, SEQ ID NO:984, and SEQ ID Nos:630-735 or a variant thereof.

[0230] In some cases, the VH and VL of the CD28 binding domain is selected from the following VH and VLs, respectively: SEQ ID NO:1030 and SEQ ID NO:1034; SEQ ID NO:1006 and SEQ ID NO:1010; SEQ ID NO:1014 and SEQ ID NO:1018; and SEQ ID NO:1022 and SEQ ID NO:1026

[0231] In other cases, the VH and VL of the CD28 binding domain is selected from the following VH and VLs, respectively: SEQ ID NOs:1 and 5, SEQ ID NOs:9 and 13, SEQ ID NOs:17 and 21, SEQ ID NOs:25 and 29, SEQ ID NOs:33 and 37, SEQ ID NOs:41 and 46, SEQ ID NOs:49 and 53, SEQ ID NOs:57 and 61, SEQ ID NOs:65 and 69, SEQ ID NOs:73 and 77, and SEQ ID NOs:81 and 85. or variants thereof.

### V. Antibodies

[0232] In one aspect provided herein are anti-CD28 antibodies and anti-PD-L1 antibodies. Antibodies provided herein can include any of the PD-L1 and/or CD28 binding domains provided herein (e.g., “1+1 Fab-scFv-Fc,” “2+1 Fab₂-scFv-Fc,” “2+1 mAb-scFv,” “1+1 common light chain,” and “2+1 common light chain” antibodies).

[0233] The antibodies provided herein include different antibody domains. As described herein and known in the art, the antibodies described herein include different domains within the heavy and light chains, which can be overlapping as well. These domains include, but are not limited to, the Fc domain, the CH1 domain, the CH2 domain, the CH3 domain, the hinge domain, the heavy constant domain (CH1-hinge-Fc domain or CH1-hinge-CH2-CH3), the variable heavy domain, the variable light domain, the light constant domain, Fab domains and scFv domains.

[0234] As shown herein, there are a number of suitable linkers (for use as either domain linkers or scFv linkers) that can be used to covalently attach the recited domains (e.g., scFvs, Fabs, Fc domains, etc.), including traditional peptide bonds, generated by recombinant techniques. Exemplary linkers to attach domains of the subject antibody to each other are depicted in FIG. 7. In some embodiments, the linker peptide may predominantly include the following amino acid residues: Gly, Ser, Ala, or Thr. The linker peptide should have a length that is adequate to link two molecules in such a way that they assume the correct conformation relative to one another so that they retain the desired activity. In one embodiment, the linker is from about 1 to 50 amino acids in length, preferably about 1 to 30 amino acids in length. In one embodiment, linkers of 1 to 20 amino acids in length may be used, with from about 5 to about 10 amino acids finding use in some embodiments. Useful linkers include glycine-serine polymers, including for example (GS)n, (GSGGS)n, (GGGGS)n, and (GGGS)n, where n is an integer of at least one (and generally from 3 to 4), glycine-alanine polymers, alanine-serine polymers, and other flexible linkers. Alternatively, a variety of nonproteinaceous polymers, including but not limited to polyethylene glycol (PEG), polypropylene glycol, polyoxyalkylenes, or copolymers of polyethylene glycol and polypropylene glycol, may find use as linkers.

[0235] Other linker sequences may include any sequence of any length of CL/CH1 domain but not all residues of CL/CH1 domain; for example the first 5-12 amino acid residues of the CL/CH1 domains. Linkers can be derived from immunoglobulin light chain, for example Cκ or Cλ. Linkers can be derived from immunoglobulin heavy chains of any isotype, including for example Cγ1, Cγ2, Cγ3, Cγ4, Cα1, Cα2, Cδ, Cε, and Cμ. Linker sequences may also be derived from other proteins such as Ig-like proteins (e.g., TCR, FcR, KIR), hinge region-derived sequences, and other natural sequences from other proteins.

[0236] In some embodiments, the linker is a “domain linker”, used to link any two domains as outlined herein together. For example, in the 2+1 Fab₂-scFv-Fc format, there may be a domain linker that attaches the C-terminus of the CH1 domain of the Fab to the N-terminus of the scFv, with another optional domain linker attaching the C-terminus of the scFv to the CH2 domain (although in many embodiments the hinge is used as this domain linker). While any suitable linker can be used, many embodiments utilize a glycine-serine polymer as the domain linker, including for example (GS)n, (GSGGS)n, (GGGGS)n, and (GGGS)n, where n is an integer of at least one (and generally from 3 to 4 to 5) as well as any peptide sequence that allows for recombinant attachment of the two domains with sufficient length and flexibility to allow each domain to retain its biological function. In some cases, and with attention being paid to “strandedness”, as outlined below, charged domain linkers, as used in some embodiments of scFv linkers can be used. Exemplary useful domain linkers are depicted in FIG. 7.

[0237] In some embodiments, the linker is a scFv linker that is used to covalently attach the VH and VL domains as discussed herein. In many cases, the scFv linker is a charged scFv linker, a number of which are shown in FIG. 6. Accordingly, provided herein are charged scFv linkers, to facilitate the separation in pI between a first and a second monomer. That is, by incorporating a charged scFv linker, either positive or negative (or both, in the case of scaffolds that use scFvs on different monomers), this allows the monomer comprising the charged linker to alter the pI without making further changes in the Fc domains. These charged linkers can be substituted into any scFv containing standard linkers. Again, as will be appreciated by those in the art, charged scFv linkers are used on the correct “strand” or monomer, according to the desired changes in pI. For example, as discussed herein, to make 1+1 Fab-scFv-Fc format heterodimeric antibody, the original pI of the Fv region for each of the desired antigen binding domains are calculated, and one is chosen to make an scFv, and depending on the pI, either positive or negative linkers are chosen.

[0238] Charged domain linkers can also be used to increase the pI separation of the monomers of the invention as well, and thus those included in FIG. 6 can be used in any embodiment herein where a linker is utilized.

[0239] The PD-L1 binding domains and CD28 binding domains provided can be included in any useful antibody format including, for example, canonical immunoglobulin, as well as the “1+1 Fab-scFv-Fc,” “2+1 Fab₂-scFv-Fc,” “2+1 mAb-scFv,” “1+1 common light chain,” and “2+1 common light chain” formats provided herein (see, e.g., FIGS. 26 and 27). Other useful antibody formats include, but are not limited to, “mAb-Fv,” “mAb-scFv,” “central-Fv”, “one armed scFv-mAb,” “scFv-mAb,” “dual scFv,” and “trident” format antibodies, as disclosed in US20180127501A1, which is incorporated by reference herein, particularly in pertinent part relating to antibody formats (see, e.g., FIG. 2).

[0240] In some embodiments, the subject antibody includes one or more of the PD-L1 ABDs provided herein. In some embodiments, the antibody includes one PD-L1 ABD. In other embodiments, the antibody includes two PD-L1 ABDs.

[0241] In an exemplary embodiment, the antibody is a bispecific antibody that includes one or two PD-L1 ABDs, including any of the PD-L1 ABDs provided herein. Bispecific antibody that include such PD-L1 ABDs include, for example, “1+1 Fab-scFv-Fc,” “2+1 Fab₂-scFv-Fc,” “2+1 mAb-scFv,” “1+1 common light chain,” and “2+1 common light chain” bispecifics format antibodies (FIGS. 26 and 27). In exemplary embodiments, the PD-L1 ABD is selected from those in FIGS. 28-31, as well as FIGS. 15, 73 and 78 of U.S. Pat. No. 10,793,632, as well as SEQ ID NOs:3961 to 4432 of that application. In exemplary embodiments, the PD-L1 ABD is one of the following 2G4 ABDs: 2G4[PDL1]_H1L1, 2G4[PDL1]_H1.12_L1.24, 2G4[PDL1]_H1.12_L1.66, 2G4[PDL]_H1.12_L1.68, 2G4[PDL1]_H1.12_L1.14, 2G4[PDL1]_H1.4_L1.23, 2G4[PDL1]_H1.4_L1.24, 2G4[PDL1]_H1.9_L1, 2G4[PDL1]_H1.62_L1.63, 2G4[PDL1]_H1.6_L1.3, 2G4[PDL1]_H1.61_L1.61, 2G4[PDL1]_H1.60_L1.60, 2G4[PDL1]_H1.59_L1.60, 2G4[PDL]_H1.14_L1.26, 2G4[PDL1]_H1_L1.27, 2G4[PDL1]_H1.8_L1.26, 2G4[PDL1]_H1_L1.25, 2G4[PDL1]_H1.10_L1.23, 2G4[PDL1]_H1.1_L1.1, 2G4[PDL]_H1_L1.29 (FIGS. 28-31). In exemplary embodiments the PD-L1 binding domains is a Fab. In some embodiments, such bispecific antibodies are heterodimeric bispecific antibodies that include any of the heterodimerization skew variants, pI variants and/or ablation variants described herein. See FIG. 8.

[0242] In some embodiments, the subject antibody includes one or more of the CD28 ABDs provided herein. In some embodiments, the antibody includes one CD28 ABD. In other embodiments, the antibody includes two CD28 ABDs. In exemplary embodiments, the antibody includes the variable heavy domain and variable light domain of one of the CD28 ABDs: 1A7[CD28]_H1L1, 1A7[CD28]_H1.14L1, 1A7[CD28]_L1H1.14, 1A7[CD28]_H1.1L1, 1A7[CD28]_H1L1.71, 1A7[CD28]_H1.14L1.71, 1A7[CD28]_L1.71H1.14, 1A7[CD28]_H1.1L1.71, HuTN228[CD28]_H1L1, CD28.3[CD28]_H0L0, hCD28.3[CD28]_H1L1, 5.11A1[CD28]_H0L0, TGN1412_H1L1, 341VL34[CD28]_H1L1, 341VL36[CD28]_H1L1, 281VL4[CD28]_H1L1, PV1[CD28]_H0L0, m9.3[CD28]_H0L0, and hu9.3[CD28]_H1L1 or a variant thereof (FIGS. 18-23 and the Sequence Listing).

[0243] In an exemplary embodiment, the antibody is a bispecific antibody that includes one or two CD28 ABDs, including any of the CD28 ABDs provided herein. Bispecific antibody that include such CD28 ABDs include, for example, “1+1 Fab-scFv-Fc,” “2+1 Fab₂-scFv-Fc,” “2+1 mAb-scFv,” “1+1 common light chain,” and “2+1 common light chain” bispecifics format antibodies (FIG. 21). In exemplary embodiments, the CD28 ABD is one of the following CD28 ABDs: 1A7[CD28]_H1L1, 1A7[CD28]_H1.14L1, 1A7[CD28]_L1H1.14, 1A7[CD28]_H1.1L1, 1A7[CD28]_H1L1.71, 1A7[CD28]_H1.14L1.71, 1A7[CD28]_L1.71H1.14, 1A7[CD28]_H1.1L1.71, HuTN228[CD28]_H1L1, CD28.3[CD28]_H0L0, hCD28.3[CD28]_H1L1, 5.11 A1[CD28]_H0L0, TGN1412_H11, 341VL34[CD28]_H1L1, 341VL36[CD28]_H1L1, 281VL4[CD28]_H1L1, PV1[CD28]_H0L0, m9.3[CD28]_H0L0, and hu9.3[CD28]_H1L1 or a variant thereof (FIGS. 18-23 and the Sequence Listing). In exemplary embodiments, the CD28 ABD is an anti-CD28 scFv included in an “1+1 Fab-scFv-Fc,” or “2+1 Fab₂-scFv-Fc bispecifics format antibodies (FIG. 21). In some embodiments, such bispecific antibodies are heterodimeric bispecific antibodies that include any of the heterodimerization skew variants, pI variants and/or ablation variants described herein. See FIG. 8.

### A. Chimeric and Humanized Antibodies

[0244] In certain embodiments, the subject antibodies provided herein include a heavy chain variable region from a particular germline heavy chain immunoglobulin gene and/or a light chain variable region from a particular germline light chain immunoglobulin gene. For example, such antibodies may comprise or consist of a human antibody comprising heavy or light chain variable regions that are “the product of” or “derived from” a particular germline sequence. A human antibody that is “the product of” or “derived from” a human germline immunoglobulin sequence can be identified as such by comparing the amino acid sequence of the human antibody to the amino acid sequences of human germline immunoglobulins and selecting the human germline immunoglobulin sequence that is closest in sequence (i.e., greatest % identity) to the sequence of the human antibody (using the methods outlined herein). A human antibody that is “the product of” or “derived from” a particular human germline immunoglobulin sequence may contain amino acid differences as compared to the germline sequence, due to, for example, naturally-occurring somatic mutations or intentional introduction of site-directed mutation. However, a humanized antibody typically is at least 90% identical in amino acids sequence to an amino acid sequence encoded by a human germline immunoglobulin gene and contains amino acid residues that identify the antibody as being derived from human sequences when compared to the germline immunoglobulin amino acid sequences of other species (e.g., murine germline sequences). In certain cases, a humanized antibody may be at least 95, 96, 97, 98 or 99%, or even at least 96%, 97%, 98%, or 99% identical in amino acid sequence to the amino acid sequence encoded by the germline immunoglobulin gene. Typically, a humanized antibody derived from a particular human germline sequence will display no more than 10-20 amino acid differences from the amino acid sequence encoded by the human germline immunoglobulin gene (prior to the introduction of any skew, pI and ablation variants herein; that is, the number of variants is generally low, prior to the introduction of the variants of the invention). In certain cases, the humanized antibody may display no more than 5, or even no more than 4, 3, 2, or 1 amino acid difference from the amino acid sequence encoded by the germline immunoglobulin gene (again, prior to the introduction of any skew, pI and ablation variants herein; that is, the number of variants is generally low, prior to the introduction of the variants of the invention).

[0245] In one embodiment, the parent antibody has been affinity matured, as is known in the art. Structure-based methods may be employed for humanization and affinity maturation, for example as described in U.S. Ser. No. 11/004,590. Selection based methods may be employed to humanize and/or affinity mature antibody variable regions, including but not limited to methods described in Wu et al., 1999, J. Mol. Biol. 294:151-162; Baca et al., 1997, J. Biol. Chem. 272(16):10678-10684; Rosok et al., 1996, J. Biol. Chem. 271(37): 22611-22618; Rader et al., 1998, Proc. Natl. Acad. Sci. USA 95: 8910-8915; Krauss et al., 2003, Protein Engineering 16(10):753-759, all entirely incorporated by reference. Other humanization methods may involve the grafting of only parts of the CDRs, including but not limited to methods described in U.S. Ser. No. 09/810,510; Tan et al., 2002, J. Immunol. 169:1119-1125; De Pascalis et al., 2002, J. Immunol. 169:3076-3084, all entirely incorporated by reference.

### B. Anti-CD28×Anti-PD-L1 Antibodies

[0246] In another aspect, provided herein are anti-CD28×anti-PD-L1 antibodies. In some embodiments, the anti-CD28×anti-PD-L1 antibody includes an agonistic CD28 binding domain that provides co-stimulatory function by binding to CD28 on T cells. As such, the anti-CD28×anti-PD-L1 antibody provided herein enhance immune responses selectively at tumor sites that express PD-L1. In some embodiments, the anti-CD28×anti-PD-L1 antibody is a bispecific antibody. In some embodiments, the anti-CD28×anti-PD-L1 antibody is a trispecific antibody. In some embodiments, the anti-CD28×anti-PD-L1 antibody is a bivalent antibody. In some embodiments, the anti-CD28×anti-PD-L1 antibody is a trivalent antibody. In some embodiments, the anti-CD28×anti-PD-L1 antibody is a bispecific, bivalent antibody. In exemplary embodiments, the anti-CD28×anti-PD-L1 antibody is a bispecific, trivalent antibody.

[0247] As is more fully outlined herein, the anti-CD28×anti-PD-L1 antibody can be in a variety of formats, as outlined below. Exemplary formats include the “1+1 Fab-scFv-Fc,” “2+1 Fab₂-scFv-Fc,” “1+1 common light chain,” and “2+1 common light chain” formats provided herein (see, e.g., FIGS. 26 and 27). Other useful antibody formats include, but are not limited to, “mAb-Fv,” “mAb-scFv,” “central-Fv”, “one armed scFv-mAb,” “scFv-mAb,” “dual scFv,” and “trident” format antibodies, as disclosed in US20180127501A1, which is incorporated by reference herein, particularly in pertinent part relating to antibody formats (see, e.g., FIG. 2).

[0248] The—anti-CD28×anti-PD-L1 antibody can include any suitable CD28 ABD, including those described herein. In some embodiments, the CD28 ABD is an agonistic ABD that provides co-stimulatory function upon binding to CD28. In some embodiments, the anti-CD28×anti-TAA antibody includes a CD28 binding domain that includes the variable heavy domain and variable light of one of the following CD28 binding domains or variant thereof: 1A7[CD28]_H1L1, 1A7[CD28]_H1.14L1, 1A7[CD28]_L1H1.14, 1A7[CD28]_H1.1L1, 1A7[CD28]_H1L1.71, 1A7[CD28]_H1.14L1.71, 1A7[CD28]_L1.71H1.14, 1A7[CD28]_H1.1L1.71, HuTN228[CD28]_H1L1, CD28.3[CD28]_H0L0, hCD28.3[CD28]_H1L1, 5.11A1[CD28]_H0L0, TGN1412_H1L1, 341VL34[CD28]_H1L1, 341VL36[CD28]_H1L1, 281VL4[CD28]_H1L1, PV1[CD28]_H0L0, m9.3[CD28]_H0L0, and hu9.3[CD28]_H1L1 or a variant thereof (FIGS. 18-23 and the Sequence Listing).

[0249] The anti-CD28×anti-PD-L1 antibody provided herein can include one or more PD-L1 binding domains. In some embodiments, the anti-CD28×anti-PD-L1 antibody includes one PD-L1 binding domain. In certain embodiments, the anti-CD28×anti-PD-L1 antibody includes two PD-L1 binding domains.

[0250] Note that unless specified herein, the order of the antigen list in the name does not confer structure; that is an anti-PD-L1×anti-CD28 1+1 Fab-scFv-Fc antibody can have the scFv bind to PD-L1 or CD28, although in some cases, the order specifies structure as indicated.

[0251] In addition, in embodiments wherein the subject antibody includes an scFv, the scFv can be in an orientation from N- to C-terminus of VH-scFv linker-VL or VL-scFv linker-VH. In some formats, one or more of the ABDs generally is a Fab that includes a VH domain on one protein chain (generally as a component of a heavy chain) and a VL on another protein chain (generally as a component of a light chain).

[0252] As will be appreciated by those in the art, any set of 6 CDRs or VH and VL domains can be in the scFv format or in the Fab format, which is then added to the heavy and light constant domains, where the heavy constant domains comprise variants (including within the CH1 domain as well as the Fc domain). The scFv sequences contained in the sequence listing utilize a particular charged linker, but as outlined herein, uncharged or other charged linkers can be used, including those depicted in FIG. 6.

[0253] In addition, as discussed above, the numbering used in the Sequence Listing for the identification of the CDRs is Kabat, however, different numbering can be used, which will change the amino acid sequences of the CDRs as shown in Table 2.

[0254] For all of the variable heavy and light domains listed herein, further variants can be made. As outlined herein, in some embodiments the set of 6 CDRs can have from 0, 1, 2, 3, 4 or 5 amino acid modifications (with amino acid substitutions finding particular use), as well as changes in the framework regions of the variable heavy and light domains, as long as the frameworks (excluding the CDRs) retain at least about 80, 85 or 90% identity to a human germline sequence selected from those listed in FIG. 1 of U.S. Pat. No. 7,657,380, which Figure and Legend is incorporated by reference in its entirety herein. Thus, for example, the identical CDRs as described herein can be combined with different framework sequences from human germline sequences, as long as the framework regions retain at least 80, 85 or 90% identity to a human germline sequence selected from those listed in FIG. 1 of U.S. Pat. No. 7,657,380. Alternatively, the CDRs can have amino acid modifications (e.g., from 1, 2, 3, 4 or 5 amino acid modifications in the set of CDRs (that is, the CDRs can be modified as long as the total number of changes in the set of 6 CDRs is less than 6 amino acid modifications, with any combination of CDRs being changed; e.g., there may be one change in vlCDR1, two in vhCDR2, none in vhCDR3, etc.)), as well as having framework region changes, as long as the framework regions retain at least 80, 85 or 90% identity to a human germline sequence selected from those listed in FIG. 1 of U.S. Pat. No. 7,657,380.

### C. Heterodimeric Antibodies

[0255] In exemplary embodiments, the αPD-L1 antibodies provided herein are heterodimeric bispecific antibodies (e.g., αPD-L1×αCD28 heterodimeric bispecific antibodies) that include two variant Fc domain sequences. Such variant Fc domains include amino acid modifications to facilitate the self-assembly and/or purification of the heterodimeric antibodies.

[0256] An ongoing problem in antibody technologies is the desire for “bispecific” antibodies that bind to two different antigens simultaneously, in general thus allowing the different antigens to be brought into proximity and resulting in new functionalities and new therapies. In general, these antibodies are made by including genes for each heavy and light chain into the host cells. This generally results in the formation of the desired heterodimer (A-B), as well as the two homodimers (A-A and B-B (not including the light chain heterodimeric issues)). However, a major obstacle in the formation of bispecific antibodies is the difficulty in biasing the formation of the desired heterodimeric antibody over the formation of the homodimers and/or purifying the heterodimeric antibody away from the homodimers.

[0257] There are a number of mechanisms that can be used to generate the subject heterodimeric antibodies. In addition, as will be appreciated by those in the art, these different mechanisms can be combined to ensure high heterodimerization. Amino acid modifications that facilitate the production and purification of heterodimers are collectively referred to generally as “heterodimerization variants.” As discussed below, heterodimerization variants include “skew” variants (e.g., the “knobs and holes” and the “charge pairs” variants described below) as well as “pI variants,” which allow purification of heterodimers from homodimers. As is generally described in U.S. Pat. No. 9,605,084, hereby incorporated by reference in its entirety and specifically as below for the discussion of heterodimerization variants, useful mechanisms for heterodimerization include “knobs and holes” (“KIH”) as described in U.S. Pat. No. 9,605,084, “electrostatic steering” or “charge pairs” as described in U.S. Pat. No. 9,605,084, pI variants as described in U.S. Pat. No. 9,605,084, and general additional Fc variants as outlined in U.S. Pat. No. 9,605,084 and below.

[0258] Heterodimerization variants that are useful for the formation and purification of the subject heterodimeric antibody (e.g., bispecific antibodies) are further discussed in detailed below.

### 1. Skew Variants

[0259] In some embodiments, the αPD-L1 heterodimeric antibody (e.g., αPD-L1×αCD28 heterodimeric antibody) includes skew variants which are one or more amino acid modifications in a first Fc domain (A) and/or a second Fc domain (B) that favor the formation of Fc heterodimers (Fc dimers that include the first and the second Fc domain; (A-B) over Fc homodimers (Fc dimers that include two of the first Fc domain or two of the second Fc domain; A-A or B-B). Suitable skew variants are included in the FIG. 29 of US Publ. App. No. 2016/0355608, hereby incorporated by reference in its entirety and specifically for its disclosure of skew variants, as well as in FIGS. 3, 8 and 9.

[0260] One particular type of skew variants is generally referred to in the art as “knobs and holes,” referring to amino acid engineering that creates steric influences to favor heterodimeric formation and disfavor homodimeric formation, as described in U.S. Ser. No. 61/596,846, Ridgway et al., Protein Engineering 9(7):617 (1996); Atwell et al., J. Mol. Biol. 1997 270:26; U.S. Pat. No. 8,216,805, all of which are hereby incorporated by reference in their entirety and specifically for the disclosure of “knobs and holes” mutations. This is sometime referred to herein as “steric variants.” The figures identify a number of “monomer A-monomer B” pairs that rely on “knobs and holes”. In addition, as described in Merchant et al., Nature Biotech. 16:677 (1998), these “knobs and holes” mutations can be combined with disulfide bonds to further favor formation of Fc heterodimers.

[0261] Another method that finds use in the generation of heterodimers is sometimes referred to as “electrostatic steering” as described in Gunasekaran et al., J. Biol. Chem. 285(25):19637 (2010), hereby incorporated by reference in its entirety. This is sometimes referred to herein as “charge pairs”. In this embodiment, electrostatics are used to skew the formation towards heterodimerization. As those in the art will appreciate, these may also have an effect on pI, and thus on purification, and thus could in some cases also be considered pI variants. However, as these were generated to force heterodimerization and were not used as purification tools, they are classified as “skew variants”. These include, but are not limited to, D221E/P228E/L368E paired with D221R/P228R/K409R (e.g., these are “monomer corresponding sets) and C220E/P228E/368E paired with C220R/E224R/P228R/K409R.

[0262] In some embodiments, the skew variants advantageously and simultaneously favor heterodimerization based on both the “knobs and holes” mechanism as well as the “electrostatic steering” mechanism. In some embodiments, the heterodimeric antibody includes one or more sets of such heterodimerization skew variants. These variants come in “pairs” of “sets”. That is, one set of the pair is incorporated into the first monomer and the other set of the pair is incorporated into the second monomer. It should be noted that these sets do not necessarily behave as “knobs in holes” variants, with a one-to-one correspondence between a residue on one monomer and a residue on the other. That is, these pairs of sets may instead form an interface between the two monomers that encourages heterodimer formation and discourages homodimer formation, allowing the percentage of heterodimers that spontaneously form under biological conditions to be over 90%, rather than the expected 50% (25% homodimer A/A:50% heterodimer A/B:25% homodimer B/B). Exemplary heterodimerization “skew” variants are depicted in FIGS. 3, 8, and 9. In exemplary embodiments, the heterodimeric antibody includes a S364K/E357Q: L368D/K370S; L368D/K370S: S364K; L368E/K370S: S364K; T411T/E360E/Q362E: D401K; L368D/K370S: S364K/E357L; K370S: S364K/E357Q; or a T366S/L368A/Y407V: T366W (optionally including a bridging disulfide, T366S/L368A/Y407V/Y349C: T366W/S354C) “skew” variant amino acid substitution set. In an exemplary embodiment, the heterodimeric antibody includes a “S364K/E357Q: L368D/K370S” amino acid substitution set. In terms of nomenclature, the pair “S364K/E357Q: L368D/K370S” means that one of the monomers includes an Fc domain that includes the amino acid substitutions S364K and E357Q and the other monomer includes an Fc domain that includes the amino acid substitutions L368D and K370S; as above, the “strandedness” of these pairs depends on the starting pI.

[0263] In some embodiments, the skew variants provided herein can be optionally and independently incorporated with any other modifications, including, but not limited to, other skew variants (see, e.g., in FIG. 37 of US Publ. App. No. 2012/0149876, herein incorporated by reference, particularly for its disclosure of skew variants), pI variants, isotpypic variants, FcRn variants, ablation variants, etc. into one or both of the first and second Fc domains of the heterodimeric antibody. Further, individual modifications can also independently and optionally be included or excluded from the subject the heterodimeric antibody.

[0264] In some embodiments, the skew variants outlined herein can be optionally and independently incorporated with any pI variant (or other variants such as Fc variants, FcRn variants, etc.) into one or both heavy chain monomers, and can be independently and optionally included or excluded from the subject heterodimeric antibodies.

### 2. pI (Isoelectric Point) Variants for Heterodimers

[0265] In some embodiments, the αPD-L1 heterodimeric antibody (e.g., αPD-L1×αCD28 heterodimeric antibody) includes purification variants that advantageously allow for the separation of heterodimeric antibody from homodimeric proteins.

[0266] There are several basic mechanisms that can lead to ease of purifying heterodimeric antibodies. For example, modifications to one or both of the antibody heavy chain monomers A and B such that each monomer has a different pI allows for the isoelectric purification of heterodimeric A-B antibody from monomeric A-A and B-B proteins. Alternatively, some scaffold formats, such as the “1+1 Fab-scFv-Fc” format, the “2+1 Fab2-scFv-Fc” format, and the “2+1 CLC” format allows separation on the basis of size. As described above, it is also possible to “skew” the formation of heterodimers over homodimers using skew variants. Thus, a combination of heterodimerization skew variants and pI variants find particular use in the heterodimeric antibodies provided herein.

[0267] Additionally, as more fully outlined below, depending on the format of the heterodimeric antibody, pI variants either contained within the constant region and/or Fc domains of a monomer, and/or domain linkers can be used. In some embodiments, the heterodimeric antibody includes additional modifications for alternative functionalities that can also create pI changes, such as Fc, FcRn and KO variants.

[0268] In some embodiments, the subject heterodimeric antibodies provided herein include at least one monomer with one or more modifications that alter the pI of the monomer (i.e., a “pI variant”). In general, as will be appreciated by those in the art, there are two general categories of pI variants: those that increase the pI of the protein (basic changes) and those that decrease the pI of the protein (acidic changes). As described herein, all combinations of these variants can be done: one monomer may be wild type, or a variant that does not display a significantly different pI from wild-type, and the other can be either more basic or more acidic. Alternatively, each monomer is changed, one to more basic and one to more acidic.

[0269] Depending on the format of the heterodimer antibody, pI variants can be either contained within the constant and/or Fc domains of a monomer, or charged linkers, either domain linkers or scFv linkers, can be used. That is, antibody formats that utilize scFv(s) such as “1+1 Fab-scFv-Fc”, format can include charged scFv linkers (either positive or negative), that give a further pI boost for purification purposes. As will be appreciated by those in the art, some 1+1 Fab-scFv-Fc and 2+1 Fab₂-scFv-Fc formats are useful with just charged scFv linkers and no additional pI adjustments, although the invention does provide pI variants that are on one or both of the monomers, and/or charged domain linkers as well. In addition, additional amino acid engineering for alternative functionalities may also confer pI changes, such as Fc, FcRn and KO variants.

[0270] In subject heterodimeric antibodies that utilizes pI as a separation mechanism to allow the purification of heterodimeric proteins, amino acid variants are introduced into one or both of the monomer polypeptides. That is, the pI of one of the monomers (referred to herein for simplicity as “monomer A”) can be engineered away from monomer B, or both monomer A and B change be changed, with the pI of monomer A increasing and the pI of monomer B decreasing. As is outlined more fully below, the pI changes of either or both monomers can be done by removing or adding a charged residue (e.g., a neutral amino acid is replaced by a positively or negatively charged amino acid residue, e.g., glycine to glutamic acid), changing a charged residue from positive or negative to the opposite charge (aspartic acid to lysine) or changing a charged residue to a neutral residue (e.g., loss of a charge; lysine to serine). A number of these variants are shown in the FIGS. 3 and 4.

[0271] Thus, in some embodiments, the subject heterodimeric antibody includes amino acid modifications in the constant regions that alter the isoelectric point (pI) of at least one, if not both, of the monomers of a dimeric protein to form “pI antibodies”) by incorporating amino acid substitutions (“pI variants” or “pI substitutions”) into one or both of the monomers. As shown herein, the separation of the heterodimers from the two homodimers can be accomplished if the pIs of the two monomers differ by as little as 0.1 pH unit, with 0.2, 0.3, 0.4 and 0.5 or greater all finding use in the present invention.

[0272] As will be appreciated by those in the art, the number of pI variants to be included on each or both monomer(s) to get good separation will depend in part on the starting pI of the components, for example in the 1+1 Fab-scFv-Fc, 2+1 Fab₂-scFv-Fc, 1+1 CLC and 2+1 CLC formats, the starting pI of the scFv (1+1 Fab-scFv-Fc, 2+1 Fab₂-scFv-Fc) and Fab(s) of interest. That is, to determine which monomer to engineer or in which “direction” (e.g., more positive or more negative), the Fv sequences of the two target antigens are calculated and a decision is made from there. As is known in the art, different Fvs will have different starting pIs which are exploited in the present invention. In general, as outlined herein, the pIs are engineered to result in a total pI difference of each monomer of at least about 0.1 logs, with 0.2 to 0.5 being preferred as outlined herein.

[0273] In the case where pI variants are used to achieve heterodimerization, by using the constant region(s) of the heavy chain(s), a more modular approach to designing and purifying bispecific proteins, including antibodies, is provided. Thus, in some embodiments, heterodimerization variants (including skew and pI heterodimerization variants) are not included in the variable regions, such that each individual antibody must be engineered. In addition, in some embodiments, the possibility of immunogenicity resulting from the pI variants is significantly reduced by importing pI variants from different IgG isotypes such that pI is changed without introducing significant immunogenicity. Thus, an additional problem to be solved is the elucidation of low pI constant domains with high human sequence content, e.g., the minimization or avoidance of non-human residues at any particular position. Alternatively or in addition to isotypic substitutions, the possibility of immunogenicity resulting from the pI variants is significantly reduced by utilizing isosteric substitutions (e.g. Asn to Asp; and Gln to Glu).

[0274] As discussed below, a side benefit that can occur with this pI engineering is also the extension of serum half-life and increased FcRn binding. That is, as described in US Publ. App. No. US 2012/0028304 (incorporated by reference in its entirety), lowering the pI of antibody constant domains (including those found in antibodies and Fc fusions) can lead to longer serum retention in vivo. These pI variants for increased serum half-life also facilitate pI changes for purification.

[0275] In addition, it should be noted that the pI variants give an additional benefit for the analytics and quality control process of bispecific antibodies, as the ability to either eliminate, minimize and distinguish when homodimers are present is significant. Similarly, the ability to reliably test the reproducibility of the heterodimeric antibody production is important.

[0276] In general, embodiments of particular use rely on sets of variants that include skew variants, which encourage heterodimerization formation over homodimerization formation, coupled with pI variants, which increase the pI difference between the two monomers to facilitate purification of heterodimers away from homodimers.

[0277] Exemplary combinations of pI variants are shown in FIGS. 4 and 5, and FIG. 30 of US Publ. App. No. 2016/0355608, all of which are herein incorporated by reference in its entirety and specifically for the disclosure of pI variants. Preferred combinations of pI variants are shown in FIGS. 3 and 4. As outlined herein and shown in the figures, these changes are shown relative to IgG1, but all isotypes can be altered this way, as well as isotype hybrids. In the case where the heavy chain constant domain is from IgG2-4, R133E and R133Q can also be used.

[0278] In one embodiment, a preferred combination of pI variants has one monomer (the negative Fab side) comprising 208D/295E/384D/418E/421D variants (N208D/Q295E/N384D/Q418E/N421D when relative to human IgG1) and a second monomer (the positive scFv side) comprising a positively charged scFv linker, including (GKPGS)₄ (SEQ ID NO:892). However, as will be appreciated by those in the art, the first monomer includes a CH1 domain, including position 208. Accordingly, in constructs that do not include a CH1 domain (for example for antibodies that do not utilize a CH1 domain on one of the domains), a preferred negative pI variant Fc set includes 295E/384D/418E/421D variants (Q295E/N384D/Q418E/N421D when relative to human IgG1).

[0279] Accordingly, in some embodiments, one monomer has a set of substitutions from FIG. 4 and the other monomer has a charged linker (either in the form of a charged scFv linker because that monomer comprises an scFv or a charged domain linker, as the format dictates, which can be selected from those depicted in FIG. 6).

[0280] In some embodiments, modifications are made in the hinge of the Fc domain, including positions 216, 217, 218, 219, 220, 221, 222, 223, 224, 225, 226, 227, 228, 229, and 230 based on EU numbering. Thus, pI mutations and particularly substitutions can be made in one or more of positions 216-230, with 1, 2, 3, 4 or 5 mutations finding use. Again, all possible combinations are contemplated, alone or with other pI variants in other domains.

[0281] Specific substitutions that find use in lowering the pI of hinge domains include, but are not limited to, a deletion at position 221, a non-native valine or threonine at position 222, a deletion at position 223, a non-native glutamic acid at position 224, a deletion at position 225, a deletion at position 235 and a deletion or a non-native alanine at position 236. In some cases, only pI substitutions are done in the hinge domain, and in others, these substitution(s) are added to other pI variants in other domains in any combination.

[0282] In some embodiments, mutations can be made in the CH2 region, including positions 233, 234, 235, 236, 274, 296, 300, 309, 320, 322, 326, 327, 334 and 339, based on EU numbering. It should be noted that changes in 233-236 can be made to increase effector function (along with 327A) in the IgG2 backbone. Again, all possible combinations of these 14 positions can be made; e.g., an anti-CD28 or anti-PD-L1 antibody provided herein may include a variant Fc domain with 1, 2, 3, 4, 5, 6, 7, 8, 9 or 10 CH2 pI substitutions.

[0283] Specific substitutions that find use in lowering the pI of CH2 domains include, but are not limited to, a non-native glutamine or glutamic acid at position 274, a non-native phenylalanine at position 296, a non-native phenylalanine at position 300, a non-native valine at position 309, a non-native glutamic acid at position 320, a non-native glutamic acid at position 322, a non-native glutamic acid at position 326, a non-native glycine at position 327, a non-native glutamic acid at position 334, a non-native threonine at position 339, and all possible combinations within CH2 and with other domains.

[0284] In this embodiment, the modifications can be independently and optionally selected from position 355, 359, 362, 384, 389,392, 397, 418, 419, 444 and 447 (EU numbering) of the CH3 region. Specific substitutions that find use in lowering the pI of CH3 domains include, but are not limited to, a non-native glutamine or glutamic acid at position 355, a non-native serine at position 384, a non-native asparagine or glutamic acid at position 392, a non-native methionine at position 397, a non-native glutamic acid at position 419, a non-native glutamic acid at position 359, a non-native glutamic acid at position 362, a non-native glutamic acid at position 389, a non-native glutamic acid at position 418, a non-native glutamic acid at position 444, and a deletion or non-native aspartic acid at position 447.

### 3. Isotypic Variants

[0285] In addition, many embodiments of the subject heterodimeric antibodies rely on the “importation” of pI amino acids at particular positions from one IgG isotype into another, thus reducing or eliminating the possibility of unwanted immunogenicity being introduced into the variants. A number of these are shown in FIG. 21 of US Publ. 2014/0370013, hereby incorporated by reference. That is, IgG1 is a common isotype for therapeutic antibodies for a variety of reasons, including high effector function. However, the heavy constant region of IgG1 has a higher pI than that of IgG2 (8.10 versus 7.31). By introducing IgG2 residues at particular positions into the IgG1 backbone, the pI of the resulting monomer is lowered (or increased) and additionally exhibits longer serum half-life. For example, IgG1 has a glycine (pI 5.97) at position 137, and IgG2 has a glutamic acid (pI 3.22); importing the glutamic acid will affect the pI of the resulting protein. As is described below, a number of amino acid substitutions are generally required to significant affect the pI of the variant antibody. However, it should be noted as discussed below that even changes in IgG2 molecules allow for increased serum half-life.

[0286] In other embodiments, non-isotypic amino acid changes are made, either to reduce the overall charge state of the resulting protein (e.g., by changing a higher pI amino acid to a lower pI amino acid), or to allow accommodations in structure for stability, etc. as is more further described below.

[0287] In addition, by pI engineering both the heavy and light constant domains, significant changes in each monomer of the heterodimer can be seen. As discussed herein, having the pIs of the two monomers differ by at least 0.5 can allow separation by ion exchange chromatography or isoelectric focusing, or other methods sensitive to isoelectric point.

### 4. Calculating pI

[0288] The pI of each monomer of the antibodies provided herein can depend on the pI of the variant heavy chain constant domain and the pI of the total monomer, including the variant heavy chain constant domain and the fusion partner. Thus, in some embodiments, the change in pI is calculated on the basis of the variant heavy chain constant domain, using the chart in the FIG. 19 of US Pub. 2014/0370013. As discussed herein, which monomer to engineer is generally decided by the inherent pI of the Fv and scaffold regions. Alternatively, the pI of each monomer can be compared.

5. PI Variants that Also Confer Better FcRn In Vivo Binding

[0289] In the case where the pI variant decreases the pI of the monomer, the pI variant can have the added benefit of improving serum retention in vivo.

[0290] Although still under examination, Fc regions are believed to have longer half-lives in vivo, because binding to FcRn at pH 6 in an endosome sequesters the Fc (Ghetie and Ward, 1997 Immunol Today. 18(12): 592-598, entirely incorporated by reference). The endosomal compartment then recycles the Fc to the cell surface. Once the compartment opens to the extracellular space, the higher pH, −7.4, induces the release of Fc back into the blood. In mice, Dall' Acqua et al. showed that Fc mutants with increased FcRn binding at pH 6 and pH 7.4 actually had reduced serum concentrations and the same half-life as wild-type Fc (Dall' Acqua et al. 2002, J. Immunol. 169:5171-5180, entirely incorporated by reference). The increased affinity of Fc for FcRn at pH 7.4 is thought to forbid the release of the Fc back into the blood. Therefore, the Fc mutations that will increase Fc's half-life in vivo will ideally increase FcRn binding at the lower pH while still allowing release of Fc at higher pH. The amino acid histidine changes its charge state in the pH range of 6.0 to 7.4. Therefore, it is not surprising to find His residues at important positions in the Fc/FcRn complex.

[0291] Recently it has been suggested that antibodies with variable regions that have lower isoelectric points may also have longer serum half-lives (Igawa et al., 2010 PEDS. 23(5): 385-392, entirely incorporated by reference). However, the mechanism of this is still poorly understood. Moreover, variable regions differ from antibody to antibody. Constant region variants with reduced pI and extended half-life would provide a more modular approach to improving the pharmacokinetic properties of antibodies, as described herein.

### D. Additional Fc Variants for Additional Functionality

[0292] In addition to the heterodimerization variants discussed above, there are a number of useful Fc amino acid modification that can be made for a variety of reasons, including, but not limited to, altering binding to one or more FcγR receptors, altered binding to FcRn receptors, etc., as discussed below.

[0293] Accordingly, the antibodies provided herein (heterodimeric, as well as homodimeric) can include such amino acid modifications with or without the heterodimerization variants outlined herein (e.g., the pI variants and steric variants). Each set of variants can be independently and optionally included or excluded from any particular heterodimeric protein.

### 1. FcγR Variants

[0294] Accordingly, there are a number of useful Fc substitutions that can be made to alter binding to one or more of the FcγR receptors. In certain embodiments, the subject antibody includes modifications that alter the binding to one or more FcγR receptors (i.e., “FcγR variants”). Substitutions that result in increased binding as well as decreased binding can be useful. For example, it is known that increased binding to FcγRIIIa generally results in increased ADCC (antibody dependent cell-mediated cytotoxicity; the cell-mediated reaction wherein nonspecific cytotoxic cells that express FcγRs recognize bound antibody on a target cell and subsequently cause lysis of the target cell). Similarly, decreased binding to FcγRIIb (an inhibitory receptor) can be beneficial as well in some circumstances. Amino acid substitutions that find use in the subject antibodies include those listed in U.S. Pat. No. 8,188,321 (particularly FIG. 41) and U.S. Pat. No. 8,084,582, and US Publ. App. Nos. 20060235208 and 20070148170, all of which are expressly incorporated herein by reference in their entirety and specifically for the variants disclosed therein that affect Fcγ receptor binding. Particular variants that find use include, but are not limited to, 236A, 239D, 239E, 332E, 332D, 239D/332E, 267D, 267E, 328F, 267E/328F, 236A/332E, 239D/332E/330Y, 239D, 332E/330L, 243A, 243L, 264A, 264V and 299T. Such modification may be included in one or both Fc domains of the subject antibody.

[0295] In some embodiments, the subject antibody includes one or more Fc modifications that increase serum half-life. Fc substitutions that find use in increased binding to the FcRn receptor and increased serum half-life, as specifically disclosed in U.S. Ser. No. 12/341,769, hereby incorporated by reference in its entirety, including, but not limited to, 434S, 434A, 428L, 308F, 2591, 428L/434S, 2591/308F, 4361/428L, 4361 or V/434S, 436V/428L and 2591/308F/428L. Such modification may be included in one or both Fc domains of the subject antibody.

### 2. Ablation Variants

[0296] In some embodiments, the heterodimeric antibody (e.g., anti-PD-L1×anti-CD28 bispecific antibody) includes one or more modifications that reduce or remove the normal binding of the Fc domain to one or more or all of the Fcγ receptors (e.g., FcγR1, FcγRIIa, FcγRIIb, FcγRIIIa, etc.) to avoid additional mechanisms of action. Such modifications are referred to as “FcγR ablation variants” or “Fc knock out (FcKO or KO)” variants. In these embodiments, for some therapeutic applications, it is desirable to reduce or remove the normal binding of the Fc domain to one or more or all of the Fcγ receptors (e.g., FcγR1, FcγRIIa, FcγRIIb, FcγRIIIa, etc.) to avoid additional mechanisms of action. That is, for example, in many embodiments, particularly in the use of bispecific antibodies that bind CD28 monovalently, it is generally desirable to ablate FcγRIIIa binding to eliminate or significantly reduce ADCC activity. In some embodiments, of the subject antibodies described herein, at least one of the Fc domains comprises one or more Fcγ receptor ablation variants. In some embodiments, of the subject antibodies described herein, both of the Fc domains comprises one or more Fcγ receptor ablation variants. These ablation variants are depicted in FIG. 5, and each can be independently and optionally included or excluded, with preferred aspects utilizing ablation variants selected from the group consisting of G236R/L328R, E233P/L234V/L235A/G236del/S239K, E233P/L234V/L235A/G236del/S267K, E233P/L234V/L235A/G236del/S239K/A327G, E233P/L234V/L235A/G236del/S267K/A327G and E233P/L234V/L235A/G236del. It should be noted that the ablation variants referenced herein ablate FcγR binding but generally not FcRn binding.

[0297] As is known in the art, the Fc domain of human IgG1 has the highest binding to the Fcγ receptors, and thus ablation variants can be used when the constant domain (or Fc domain) in the backbone of the heterodimeric antibody is IgG1. Alternatively, or in addition to ablation variants in an IgG1 background, mutations at the glycosylation position 297 (generally to A or S) can significantly ablate binding to FcγRIIIa, for example. Human IgG2 and IgG4 have naturally reduced binding to the Fcγ receptors, and thus those backbones can be used with or without the ablation variants.

### E. Combination of Heterodimeric and Fc Variants

[0298] As will be appreciated by those in the art, all of the recited heterodimerization variants (including skew and/or pI variants) can be optionally and independently combined in any way, as long as they retain their “strandedness” or “monomer partition”. In addition, all of these variants can be combined into any of the heterodimerization formats.

[0299] In the case of pI variants, while embodiments finding particular use are shown in the figures, other combinations can be generated, following the basic rule of altering the pI difference between two monomers to facilitate purification.

[0300] In addition, any of the heterodimerization variants, skew and pI, are also independently and optionally combined with Fc ablation variants, Fc variants, FcRn variants, as generally outlined herein.

[0301] Exemplary combination of variants that are included in some embodiments of the heterodimeric 1+1 Fab-scFv-Fc, 2+1 Fab₂-scFv-Fc, 2+1 mAb-scFv, 1+1 CLC and 2+1 CLC format antibodies are included in FIG. 8. In some embodiments, the heterodimeric antibody includes a combination of variants as depicted in FIG. 8. In certain embodiments, the antibody is a heterodimeric 1+1 Fab-scFv-Fc, 2+1 Fab₂-scFv-Fc, +1 mAb-scFv, 1+1 CLC or 2+1 CLC format antibody.

### F. Useful Antibody Formats

[0302] As will be appreciated by those in the art and discussed more fully below, the heterodimeric bispecific antibodies provided herein can take on several different configurations as generally depicted in FIG. 21.

[0303] As will be appreciated by those in the art, the heterodimeric formats of the invention can have different valencies as well as be bispecific. That is, heterodimeric antibodies of the invention can be bivalent and bispecific, or trivalent and bispecific, wherein the first antigen is bound by two binding domains and the second antigen by a second binding domain.

[0304] In some embodiments, the present invention utilizes PD-L1 antigen binding domains. Any of the anti-PD-L1 antigen binding domains can be used, whether CDRs, variable light and variable heavy domains, Fabs and scFvs as depicted herein, including in any of the Figures (e.g., FIGS. 28-31) and the Sequence Listing, can be used, optionally and independently combined in any combination.

[0305] In some embodiments, the present invention utilizes CD28 antigen binding domains in combination with PD-L1 binding domains. As is outlined herein, when CD28 is one of the target antigens, it is preferable that the CD28 is bound only monovalently. As will be appreciated by those in the art, any collection of anti-CD28 CDRs, anti-CD28 variable light and variable heavy domains, Fabs and scFvs as depicted herein, including in any of the Figures (see particularly FIGS. 18-23) and the Sequence Listing, can be used.

### 1. 1+1 Fab-scFv-Fc Format (“Bottle Opener”)

[0306] One heterodimeric antibody format that finds particular use in subject bispecific antibodies provided herein (e.g., anti-CD28×anti-PD-L1 antibody) is the “1+1 Fab-scFv-Fc” or “bottle opener” format as shown in FIG. 26A. The 1+1 Fab-scFv-Fc format antibody includes a first monomer that is a “regular” heavy chain (VH1-CH1-hinge-CH2-CH3), wherein VH1 is a first variable heavy domain and CH2-CH3 is a first Fc domain. The 1+1 Fab-scFv-Fc also includes a light chain that includes a first variable light domain VL1 and a constant light domain CL. The light chain interacts with the VH1-CH1 of the first monomer to form a first antigen binding domain that is a Fab. The second monomer of the antibody includes a second binding domain that is a single chain Fv (“scFv”, as defined below) and a second Fc domain. The scFv includes a second variable heavy domain (VH2) and a second variable light domain (VL2), wherein the VH2 is attached to the VL2 using an scFv linker that can be charged (see, e.g., FIG. 6). The scFv is attached to the heavy chain using a domain linker (see, e.g., FIG. 7). The two monomers are brought together by the use of amino acid variants (e.g., heterodimerization variants, discussed above) in the constant regions (e.g., the Fc domain, the CH1 domain and/or the hinge region) that promote the formation of heterodimeric antibodies as is described more fully below. This structure is sometimes referred to herein as the “bottle-opener” format, due to a rough visual similarity to a bottle-opener. In some embodiments, the 1+1 Fab-scFv-Fc format antibody is a bivalent antibody.

[0307] There are several distinct advantages to the present “1+1 Fab-scFv-Fc” format. As is known in the art, antibody analogs relying on two scFv constructs often have stability and aggregation problems, which can be alleviated in the present invention by the addition of a “regular” heavy and light chain pairing. In addition, as opposed to formats that rely on two heavy chains and two light chains, there is no issue with the incorrect pairing of heavy and light chains (e.g., heavy 1 pairing with light 2, etc.).

[0308] In some embodiments of the 1+1 Fab-scFv-Fc format antibody, one of the first or second antigen binding domain is α PD-L1 binding domain. In some embodiments, the first binding domain (i.e., the Fab) is α PD-L1 binding domain. In certain embodiments, the second binding domain (i.e., the scFv) is the PD-L1 binding domain. Any suitable PD-L1 binding domain can be included in the subject antibody including those provided herein (FIGS. 28-31 and the Sequence Listing).

[0309] In some embodiments, the PD-L1 binding domain is one of the following PD-L1 binding domains or a variant thereof: 2G4[PDL1]_H1L1, 2G4[PDL1]_H1.12_L1.24, 2G4[PDL1]_H1.12_L1.66, 2G4[PDL]_H1.12_L1.68, 2G4[PDL1]_H1.12_L1.14, 2G4[PDL1]_H1.4_L1.23, 2G4[PDL1]_H1.4_L1.24, 2G4[PDL1]_H1.9_L1, 2G4[PDL1]_H1.62_L1.63, 2G4[PDL1]_H1.6_L1.3, 2G4[PDL1]_H1.61_L1.61, 2G4[PDL1]_H1.60_L1.60, 2G4[PDL1]_H1.59_L1.60, 2G4[PDL]_H1.14_L1.26, 2G4[PDL1]_H1_L1.27, 2G4[PDL1]_H1.8_L1.26, 2G4[PDL1]_H1_L1.25, 2G4[PDL1]_H1.10_L1.23, 2G4[PDL1]_H1.1_L1.1, 2G4[PDL1]_H1_L1.29 (FIGS. 28-31 and the Sequence Listing).

[0310] In some embodiments of the 1+1 Fab-scFv-Fc format, the PD-L1 binding domain has a variable heavy domain (VH) selected from the group consisting of: SEQ ID NO:1079, SEQ ID NO:1042, SEQ ID NO:1055, SEQ ID NO:1059, SEQ ID NO:1063, SEQ ID NO: 1067, SEQ ID NO: 1071, SEQ ID NO: 1075, SEQ ID NO:1083, SEQ ID NO:1087, SEQ ID NO:1091, SEQ ID NO:1095, SEQ ID NO:1099, and SEQ ID NOs:736-797 or a variant thereof; and a variable light domain (VL) selected from the group consisting of: SEQ ID NO:1111, SEQ ID NO:1046, SEQ ID NO: 1103, SEQ ID NO: 1107, SEQ ID NO: 1115, SEQ ID NO: 1119, SEQ ID NO: 1123, SEQ ID NO: 1127, SEQ ID NO:1131, SEQ ID NO: 1135, SEQ ID NO: 1139, SEQ ID NO: 1143, SEQ ID NO: 1147, SEQ ID NO:1151, SEQ ID NO: 1155, and SEQ ID NOS:798-868 or a variant thereof.

[0311] In some embodiments, the VH and VL of the PD-L1 binding domain are selected from the group consisting of: a VH having an amino acid sequence of SEQ ID NO:1183 and a VL having an amino acid sequence of SEQ ID NO: 1187; a VH having an amino acid of SEQ ID NO:1042 and a VL having an amino acid sequence of SEQ ID NO:1047; a VH having an amino acid sequence of SEQ ID NO: 1159 and a VL having an amino acid sequence of SEQ ID NO: 1163; a VH having an amino acid sequence of SEQ ID NO: 1167 and a VL having an amino acid sequence of SEQ ID NO:1171; a VH having an amino acid sequence of SEQ ID NO:1175 and a VL having an amino acid sequence of SEQ ID NO:1179; a VH having an amino acid sequence of SEQ ID NO: 1191 and a VL having an amino acid sequence of SEQ ID NO: 1195; a VH having an amino acid sequence of SEQ ID NO:1199 and a VL having an amino acid sequence of SEQ ID NO:1203; a VH having an amino acid sequence of SEQ ID NO:1207 and a VL having an amino acid sequence of SEQ ID NO: 1211; a VH having an amino acid sequence of SEQ ID NO:1215 and a VL having an amino acid sequence of SEQ ID NO:1219; a VH having an amino acid sequence of SEQ ID NO:1223 and a VL having an amino acid sequence of SEQ ID NO:1227; a VH having an amino acid sequence of SEQ ID NO:1231 and a VL having an amino acid sequence of SEQ ID NO:1235; a VH having an amino acid sequence of SEQ ID NO:1239 and a VL having an amino acid sequence of SEQ ID NO:1243; a VH having an amino acid sequence of SEQ ID NO:1247 and a VL having an amino acid sequence of SEQ ID NO:1251; a VH having an amino acid sequence of SEQ ID NO:1255 and a VL having an amino acid sequence of SEQ ID NO:1259; a VH having an amino acid sequence of SEQ ID NO:1263 and a VL having an amino acid sequence of SEQ ID NO:1267; a VH having an amino acid sequence of SEQ ID NO:1271 and a VL having an amino acid sequence of SEQ ID NO:1275; a VH having an amino acid sequence of SEQ ID NO:1279 and a VL having an amino acid sequence of SEQ ID NO:1283; a VH having an amino acid sequence of SEQ ID NO:1287 and a VL having an amino acid sequence of SEQ ID NO:1291; a VH having an amino acid sequence of SEQ ID NO:1295 and a VL having an amino acid sequence of SEQ ID NO:1299; and a VH having an amino acid sequence of SEQ ID NO:1303 and a VL having an amino acid sequence of SEQ ID NO:1307.

[0312] In some embodiments, the PD-L1 binding domain is selected from one of the following PD-L1 binding domains: 2.14H9 OPT, atezolizumab, avelumab, 12A4, 3G10, 10A5, h3D10 Var1, h3D10 Var2, h3D10 Var3, h3D10 Var4, h3D10 Var5, h3D10 Var6, h3D10 Var7, h3D10 Var8, h3D10 Var9, h3D10 Var10, h3D10 Var1 1, h3D10 Var12, h3D10 Var13, h3D10 Var14, Antibody A, C5H9v2, Humanized 29E.2A3, 1B9, 4H1, mAb-42, BAP058-03, BAP058-04, BAP058-06, BAP058-07, BAP058-11, BAP058-13, H6, RC5, SH1A1Q, SH1B3, SH1D1, SH1D2, SH1D12, SH1E1, SH1G9, SH1E6, SH1A2, SH1B1, H6B1L, H6A1, H6B1, H6B2, G12, RSA1, RA3, SH1E2, SH1E4, SH1B11, SH1C8, H1H9364P2, H1H9373P2, H1H8314N, PDL1.3.1 or a variant thereof.

[0313] In some embodiments, the VH and VL of the PD-L1 binding domain is selected from the following VH and VLs, respectively: SEQ ID NOs:89 and 93, SEQ ID NOs:97 and 101, SEQ ID NOs:105 and 109, SEQ ID NOs:113 and 117, SEQ ID NOs:121 and 125, SEQ ID NOs:129 and 133, SEQ ID NOs:137 and 141, SEQ ID NOs:145 and 149, SEQ ID NOs:153 and 157, SEQ ID NOs:161 and 165, SEQ ID NOs:169 and 173, SEQ ID NOs:177 and 181, SEQ ID NOs:185 and 189, SEQ ID NOs:193 and 197, SEQ ID NOs:201 and 205, SEQ ID NOs:209 and 213, SEQ ID NOs:217 and 221, SEQ ID NOs:225 and 229, SEQ ID NOs:233 and 237, SEQ ID NOs:241 and 245, SEQ ID NOs:249 and 253, SEQ ID NOs:257 and 261, SEQ ID NOs:265 and 269, SEQ ID NOs:273 and 277, SEQ ID NOs:281 and 285, SEQ ID NOs:289 and 293, SEQ ID NOs:297 and 301, SEQ ID NOs:305 and 309, SEQ ID NOs:313 and 317, SEQ ID NOs:321 and 325, SEQ ID NOs:329 and 333, SEQ ID NOs:337 and 341, SEQ ID NOs:345 and 349, SEQ ID NOs:353 and 357, SEQ ID NOs:361 and 365, SEQ ID NOs:369 and 373, SEQ ID NOs:374 and 381, SEQ ID NOs:385 and 389, SEQ ID NOs:393 and 397, SEQ ID NOs:401 and 405, SEQ ID NOs:409 and 413, SEQ ID NOs:417 and 421, SEQ ID NOs:425 and 429, SEQ ID NOs:433 and 437, SEQ ID NOs:441 and 445, SEQ ID NOs:449 and 453, SEQ ID NOs:457 and 461, SEQ ID NOs:465 and 469, SEQ ID NOs:473 and 477, SEQ ID NOs:481 and 485, SEQ ID NOs:489 and 493, SEQ ID NOs:497 and 501, SEQ ID NOs:504 and 508, SEQ ID NOs:512 and 516, SEQ ID NOs:520 and 524, SEQ ID NOs:528 and 534, SEQ ID NOs:537 and 541, SEQ ID NOs:545 and 549, SEQ ID NOs:553 and 557 or variants thereof.

[0314] In some embodiments of the 1+1 Fab-scFv-Fc format antibody, one of the first or second antigen binding domain is a CD28 binding domain and the other binding domain is a PD-L1 binding domain. In some embodiments where the 1+1 Fab-scFv-Fc includes a CD28 binding domain and α PD-L1 binding domain, it is the scFv that binds to the CD28, and the Fab that binds PD-L1. Exemplary anti-PD-L1×anti-CD28 bispecific antibody in the 1+1 Fab-scFv-Fc format is depicted in FIG. 35. In some embodiments, the anti-PD-L1×anti-CD28 bispecific antibody is an antibody depicted in FIG. 35.

[0315] In some embodiments, the first and second Fc domains of the 1+1 Fab-scFv-Fc format antibody are variant Fc domains that include heterodimerization skew variants (e.g., a set of amino acid substitutions as shown in FIGS. 3 and 8). Particularly useful heterodimerization skew variants include S364K/E357Q: L368D/K370S; L368D/K370S: S364K; L368E/K370S: S364K; T411T/E360E/Q362E: D401K; L368D/K370S: S364K/E357L; K370S: S364K/E357Q; T366S/L368A/Y407V: T366W and T366S/L368A/Y407V/Y349C: T366W/S354C (EU numbering)). In exemplary embodiments, one of the first or second variant Fc domains includes heterodimerization skew variants L368D/K370S and the other of the first or second variant Fc domains includes heterodimerization skew variants S364K/E357Q, wherein numbering is according to EU numbering. In exemplary embodiments, the first variant Fc domain includes heterodimerization skew variants L368D/K370S and the second variant Fc domain includes heterodimerization skew variants S364K/E357Q, wherein numbering is according to EU numbering.

[0316] In some embodiments, the variant Fc domains include ablation variants (including those shown in FIG. 5). In some embodiments, each of the first and second variant Fc domains include ablation variants E233P/L234V/L235A/G236_/S267K, wherein numbering is according to EU numbering.

[0317] In some embodiments, the constant domain (CH1-hinge-CH2-CH3) of the first monomer includes pI variants (including those shown in FIG. 4). In exemplary embodiments, the constant domain (CH1-hinge-CH2-CH3) of the first monomer includes pI variants N208D/Q295E/N384D/Q418E/N421D, wherein numbering is according to EU numbering.

[0318] In exemplary embodiments, the CH1-hinge-CH2-CH3 of the first monomer comprises amino acid variants L368D/K370S/N208D/Q295E/N384D/Q418E/N421D/E233P/L234V/L235A/G236del/S267K, the second Fc domain comprises amino acid variants S364K/E357Q/E233P/L234V/L235A/G236del/S267K, wherein numbering is according to EU numbering.

[0319] In some embodiments, the scFv of the 1+1 Fab-scFv-Fc format antibody provided herein includes a charged scFv linker (including those shown in FIG. 6). In some embodiments, the 1+1 Fab-scFv-Fc format antibody provided herein includes FcRn variants M428L/N434S, wherein numbering is according to EU numbering.

[0320] In exemplary embodiments, the first variant Fc domain includes heterodimerization skew variants L368D/K370S and the second variant Fc domain includes heterodimerization skew variants S364K/E357Q; each of the first and second variant Fc domains include ablation variants E233P/L234V/L235A/G236_/S267K; and the constant domain (CH1-hinge-CH2-CH3) of the first monomer includes pI variants N208D/Q295E/N384D/Q418E/N421D, wherein numbering is according to EU numbering. In some embodiments, the scFv of the 1+1 Fab-scFv-Fc format antibody provided herein includes a (GKPGS)₄ charged scFv linker. In some embodiments, the 1+1 Fab-scFv-Fc format antibody provided herein includes FcRn variants M428L/N434S, wherein numbering is according to EU numbering.

[0321] In some embodiments, one of the first binding domain or the second binding domain binds CD28 and the other binding domain binds PD-L1. In some embodiments of the 1+1 Fab-scFv-Fc format antibody, the first antigen binding domain (i.e., the Fab binding domain) binds PD-L1 and the second antigen binding domain (i.e., the scFv) binds CD28. In some embodiments of the 1+1 Fab-scFv-Fc format antibody, the first antigen binding domain binds CD28 (i.e., the Fab binding domain) and the second antigen binding domain (i.e., the scFv) binds PD-L1.

[0322] Any suitable CD28 binding domain can be included in subject 1+1 Fab-scFv-Fc format antibody, including any of the CD28 binding domains provided herein (see FIGS. 18-23 and the Sequence listing). In some embodiments, the CD28 binding domain is one of the following CD28 binding domains or a variant thereof: 1A7[CD28]_H11, 1A7[CD28]_H1.14L1, 1A7[CD28]_L1H1.14, 1A7[CD28]_H1.1L1, 1A7[CD28]_H1L1.71, 1A7[CD28]_H1.14L1.71, 1A7[CD28]_L1.71H1.14, 1A7[CD28]_H1.1L1.71, HuTN228[CD28]_H1L1, CD28.3[CD28]_H0L0, hCD28.3[CD28]_H1L1, 5.11A1[CD28]_H0L0, TGN1412_H1L1, 341VL34[CD28]_H1L1, 341VL36[CD28]_H1L1, 281VL4[CD28]_H1L1, PV1[CD28]_H0L0, m9.3[CD28]_H0L0, and hu9.3[CD28]_H1L1 or a variant thereof (FIGS. 18-23 and the Sequence Listing).

[0323] In some embodiments of the 1+1 Fab-scFv-Fc format, the CD28 binding domain has a variable heavy domain (VH) selected from the group consisting of: SEQ ID NO:998, SEQ ID NO:984, SEQ ID NO:994 and SEQ ID NOs:561-629 or a variant thereof; and a variable light domain (VL) selected from the group consisting of: SEQ ID NO:1002, SEQ ID NO:984, and SEQ ID NOs:630-735 or a variant thereof. In some embodiments, the VH and VL of the CD28 binding domain are selected from the group consisting of: a VH having an amino acid sequence of SEQ ID NO:1030 and a VL having an amino acid sequence of SEQ ID NO:1034; a VH having an amino acid sequence of SEQ ID NO:1006 and a VL having an amino acid sequence of SEQ ID NO:1010; a VH having an amino acid sequence of SEQ ID NO:1014 and a VL having an amino acid sequence of SEQ ID NO:1018; and a VH having an amino acid sequence of SEQ ID NO:1022 and a VL having an amino acid sequence of SEQ ID NO:1026.

[0324] In exemplary embodiments, the CD28 binding domain includes a 1A7[CD28]_H1.14 variable heavy domain. In some embodiments, the CD28 binding domain includes a 1A7[CD28]_H1.14 variable heavy domain or variant thereof and a light variable domain of any of the CD28 binding domains provided herein. In exemplary embodiments, the CD28 binding domain is 1A7[CD28]_H1.14L1.71 or a variant thereof.

[0325] In some embodiments, the CD28 binding domain is selected from one of the following CD28 binding domains: CD28.3[CD28]_H0L0, hCD28.3[CD28]_H1L1, 5.11A1[CD28]_H0L0, TGN1412_H1L1, 341VL34[CD28]_H1L1, 341VL36[CD28]_H1L1, 281VL4[CD28]_H1L1, HuTN228[CD28]_H1L1, PV1[CD28]_H0L0, m9.3[CD28]_H0L0, hu9.3[CD28]_H1L1 or a variant thereof.

[0326] In some embodiments, the VH and VL of the CD28 binding domain is selected from the following VH and VLs, respectively: SEQ ID NOs:1 and 5, SEQ ID NOs:9 and 13, SEQ ID NOs:17 and 21, SEQ ID NOs:25 and 29, SEQ ID NOs:33 and 37, SEQ ID NOs:41 and 46, SEQ ID NOs:49 and 53, SEQ ID NOs:57 and 61, SEQ ID NOs:65 and 69, SEQ ID NOs:73 and 77, and SEQ ID NOs:81 and 85. or variants thereof.

[0327] Any suitable PD-L1 binding domain can be included in subject anti-CD28×anti-PD-L1 1+1 Fab-scFv-Fc format antibody, including any of the PD-L1 binding domains provided herein (see, e.g., FIGS. 28-31 and the Sequence Listing). In exemplary embodiments, the PD-L1 binding domain has a VH with an amino acid sequence of SEQ ID NO:1183 and a VL with an amino acid sequence of SEQ ID NO:1187. In exemplary embodiments, the PD-L1 binding domain has a VH with an amino acid sequence of SEQ ID NO:1042 and a VL with an amino acid sequence of SEQ ID NO:1046. In exemplary embodiments, the PD-L1 binding domain has a VH with an amino acid sequence of SEQ ID NO: 1159 and a VL with an amino acid sequence of SEQ ID NO: 1163.

[0328] FIG. 10 shows some exemplary Fc domain sequences that are useful in the 1+1 Fab-scFv-Fc format antibodies. The “monomer 1” sequences depicted in FIG. 10 typically refer to the Fc domain of the “Fab-Fc heavy chain” and the “monomer 2” sequences refer to the Fc domain of the “scFv-Fc heavy chain.” In addition, FIGS. 12-15 provides exemplary CH1-hinge domains, CH1 domains, and hinge domains that can be included in the first or second monomer of the 1+1 Fab-scFv-Fc format. Further, FIG. 16 provides useful CL sequences that can be used with this format.

### 2. 2+1 Fab₂-scFv-Fc Format (Central-scFv Format)

[0329] One heterodimeric antibody format that finds particular use in the subject bispecific antibodies provided herein (e.g., anti-PD-L1×anti-CD28×antibody) is the 2+1 Fab2-scFv-Fc format (also referred to as “central-scFv format”) shown in FIG. 26B. This antibody format includes three antigen binding domains: two Fab portions and an scFv that is inserted between the VH-CH1 and CH2-CH3 regions of one of the monomers. In some embodiments of this format, the two Fab portions each bind PD-L1. In some embodiments, the “extra” scFv domain binds CD28. In some embodiments, the 2+1 Fab₂-scFv-Fc format antibody is a trivalent antibody.

[0330] In some embodiments of the 2+1 Fab₂-scFv-Fc format, a first monomer includes a standard heavy chain (i.e., VH1-CH1-hinge-CH2-CH3), wherein VH1 is a first variable heavy domain and CH2-CH3 is a first Fc domain. A second monomer includes another first variable heavy domain (VH1), a CH1 domain (and optional hinge), a second Fc domain, and an scFv that includes an scFv variable light domain (VL2), an scFv linker and a scFv variable heavy domain (VH2). The scFv is covalently attached between the C-terminus of the CH1 domain of the second monomer and the N-terminus of the second Fc domain using optional domain linkers (VH1-CH1-[optional linker]-VH2-scFv linker-VH2-[optional linker]-CH2-CH3, or the opposite orientation for the scFv, VH1-CH1-[optional linker]-VL2-scFv linker-VH2-[optional linker]-CH2-CH3). The optional linkers can be any suitable peptide linkers, including, for example, the domain linkers included in FIG. 7. This embodiment further utilizes a common light chain that includes a variable light domain (VL1) and a constant light domain (CL). The common light chain associates with the VH1-CH1 of the first and second monomers to form two identical Fabs. In some embodiments, the identical Fabs each bind PD-L1. As for many of the embodiments herein, these constructs can include skew variants, pI variants, ablation variants, additional Fc variants, etc. as desired and described herein.

[0331] In some embodiments, the first and second Fc domains of the 2+1 Fab₂-scFv-Fc format antibody are variant Fc domains that include heterodimerization skew variants (e.g., a set of amino acid substitutions as shown in FIGS. 3 and 8). Particularly useful heterodimerization skew variants include S364K/E357Q: L368D/K370S; L368D/K370S: S364K; L368E/K370S: S364K; T411T/E360E/Q362E: D401K; L368D/K370S: S364K/E357L; K370S: S364K/E357Q; T366S/L368A/Y407V: T366W and T366S/L368A/Y407V/Y349C: T366W/S354C (EU numbering)). In exemplary embodiments, one of the first or second variant Fc domains includes heterodimerization skew variants L368D/K370S and the other of the first or second variant Fc domains includes heterodimerization skew variants S364K/E357Q, wherein numbering is according to EU numbering. In exemplary embodiments, the first variant Fc domain includes heterodimerization skew variants L368D/K370S and the second variant Fc domain includes heterodimerization skew variants S364K/E357Q, wherein numbering is according to EU numbering.

[0332] In some embodiments, the variant Fc domains include ablation variants (including those shown in FIG. 5). In some embodiments, each of the first and second variant Fc domains include ablation variants E233P/L234V/L235A/G236_/S267K, wherein numbering is according to EU numbering.

[0333] In some embodiments, the constant domain (CH1-hinge-CH2-CH3) of the first monomer includes pI variants (including those shown in FIG. 4). In exemplary embodiments, the constant domain (CH1-hinge-CH2-CH3) of the first monomer includes pI variants N208D/Q295E/N384D/Q418E/N421D, wherein numbering is according to EU numbering.

[0334] In some embodiments, the scFv of the 2+1 Fab₂-scFv-Fc format antibody provided herein includes a charged scFv linker (including those shown in FIG. 6). In some embodiments, the 2+1 Fab2-scFv-Fc format antibody provided herein includes FcRn variants M428L/N434S, wherein numbering is according to EU numbering.

[0335] In exemplary embodiments, the first variant Fc domain includes heterodimerization skew variants L368D/K370S and the second variant Fc domain includes heterodimerization skew variants S364K/E357Q; each of the first and second variant Fc domains include ablation variants E233P/L234V/L235A/G236_/S267K; and the constant domain (CH1-hinge-CH2-CH3) of the first monomer includes pI variants N208D/Q295E/N384D/Q418E/N421D, wherein numbering is according to EU numbering. In some embodiments, the scFv of the 2+1 Fab₂-scFv-Fc format antibody provided herein includes a (GKPGS)₄ charged scFv linker. In some embodiments, the 2+1 Fab2-scFv-Fc format antibody provided herein includes FcRn variants M428L/N434S, wherein numbering is according to EU numbering.

[0336] In some embodiments of the 2+1 Fab2-scFv-Fc format antibody, the two Fab domains are PD-L1 binding domains. In some embodiments, the scFv is the PD-L1 binding domain. Any suitable PD-L1 binding domain can be included in the subject 2+1 Fab2-scFv-Fc format antibody including those provided herein (FIGS. 28-31 and the Sequence Listing).

[0337] In some embodiments, the PD-L1 binding domain is one of the following PD-L1 binding domains or a variant thereof: 2G4[PDL1]_H1L1, 2G4[PDL]_H1.12_L1.24, 2G4[PDL1]_H1.12_L1.66, 2G4[PDL1]_H1.12_L1.68, 2G4[PDL]_H1.12_L1.14, 2G4[PDL1]_H1.4_L1.23, 2G4[PDL]_H1.4_L1.24, 2G4[PDL]_H1.9_L1, 2G4[PDL1]_H1.62_L1.63, 2G4[PDL]_H1.6_L1.3, 2G4[PDL]_H1.61_L1.61, 2G4[PDL1]_H1.60_L1.60, 2G4[PDL]_H1.59_L1.60, 2G4[PDL]_H1.14_L1.26, 2G4[PDL1]_H1_L1.27, 2G4[PDL]_H1.8_L1.26, 2G4[PDL1]_H1_L1.25, 2G4[PDL1]_H1.10_L1.23, 2G4[PDL]_H1.1_L1.1, 2G4[PDL]_H1_L1.29 (FIGS. 28-31 and the Sequence Listing).

[0338] In some embodiments of the 2+1 Fab2-scFv-Fc format antibody, the PD-L1 binding domain has a variable heavy domain (VH) selected from the group consisting of: SEQ ID NO:1079, SEQ ID NO:1042, SEQ ID NO:1055, SEQ ID NO:1059, SEQ ID NO:1063, SEQ ID NO: 1067, SEQ ID NO: 1071, SEQ ID NO: 1075, SEQ ID NO:1083, SEQ ID NO:1087, SEQ ID NO:1091, SEQ ID NO:1095, SEQ ID NO:1099, and SEQ ID NOs:736-797 or a variant thereof; and a variable light domain (VL) selected from the group consisting of: SEQ ID NO:1111, SEQ ID NO:1046, SEQ ID NO: 1103, SEQ ID NO: 1107, SEQ ID NO: 1115, SEQ ID NO: 1119, SEQ ID NO: 1123, SEQ ID NO: 1127, SEQ ID NO:1131, SEQ ID NO: 1135, SEQ ID NO: 1139, SEQ ID NO: 1143, SEQ ID NO: 1147, SEQ ID NO:1151, SEQ ID NO: 1155, and SEQ ID NOS:798-868 or a variant thereof.

[0339] In some embodiments, the VH and VL of the PD-L1 binding domain are selected from the group consisting of: a VH having an amino acid sequence of SEQ ID NO:1183 and a VL having an amino acid sequence of SEQ ID NO:1187; a VH having an amino acid of SEQ ID NO:1042 and a VL having an amino acid sequence of SEQ ID NO:1047; a VH having an amino acid sequence of SEQ ID NO:1159 and a VL having an amino acid sequence of SEQ ID NO:1163; a VH having an amino acid sequence of SEQ ID NO:1167 and a VL having an amino acid sequence of SEQ ID NO:1171; a VH having an amino acid sequence of SEQ ID NO:1175 and a VL having an amino acid sequence of SEQ ID NO:1179; a VH having an amino acid sequence of SEQ ID NO: 1191 and a VL having an amino acid sequence of SEQ ID NO: 1195; a VH having an amino acid sequence of SEQ ID NO:1199 and a VL having an amino acid sequence of SEQ ID NO:1203; a VH having an amino acid sequence of SEQ ID NO:1207 and a VL having an amino acid sequence of SEQ ID NO:1211; a VH having an amino acid sequence of SEQ ID NO:1215 and a VL having an amino acid sequence of SEQ ID NO:1219; a VH having an amino acid sequence of SEQ ID NO:1223 and a VL having an amino acid sequence of SEQ ID NO:1227; a VH having an amino acid sequence of SEQ ID NO:1231 and a VL having an amino acid sequence of SEQ ID NO:1235; a VH having an amino acid sequence of SEQ ID NO:1239 and a VL having an amino acid sequence of SEQ ID NO:1243; a VH having an amino acid sequence of SEQ ID NO:1247 and a VL having an amino acid sequence of SEQ ID NO:1251; a VH having an amino acid sequence of SEQ ID NO:1255 and a VL having an amino acid sequence of SEQ ID NO:1259; a VH having an amino acid sequence of SEQ ID NO:1263 and a VL having an amino acid sequence of SEQ ID NO:1267; a VH having an amino acid sequence of SEQ ID NO:1271 and a VL having an amino acid sequence of SEQ ID NO:1275; a VH having an amino acid sequence of SEQ ID NO:1279 and a VL having an amino acid sequence of SEQ ID NO:1283; a VH having an amino acid sequence of SEQ ID NO:1287 and a VL having an amino acid sequence of SEQ ID NO:1291; a VH having an amino acid sequence of SEQ ID NO:1295 and a VL having an amino acid sequence of SEQ ID NO:1299; and a VH having an amino acid sequence of SEQ ID NO:1303 and a VL having an amino acid sequence of SEQ ID NO:1307.

[0340] In some embodiments, the PD-L1 binding domain is selected from one of the following PD-L1 binding domains: 2.14H9 OPT, atezolizumab, avelumab, 12A4, 3G10, 10A5, h3D10 Var1, h3D10 Var2, h3D10 Var3, h3D10 Var4, h3D10 Var5, h3D10 Var6, h3D10 Var7, h3D10 Var8, h3D10 Var9, h3D10 Var10, h3D10 Var1 1, h3D10 Var12, h3D10 Var13, h3D10 Var14, Antibody A, C5H9v2, Humanized 29E.2A3, 1B9, 4H1, mAb-42, BAP058-03, BAP058-04, BAP058-06, BAP058-07, BAP058-11, BAP058-13, H6, RC5, SH1A1Q, SH1B3, SH1D1, SH1D2, SH1D12, SH1E1, SH1G9, SH1E6, SH1A2, SH1B1, H6B1L, H6A1, H6B1, H6B2, G12, RSA1, RA3, SH1E2, SH1E4, SH1B11, SH1C8, H1H9364P2, H1H9373P2, H1H8314N, PDL1.3.1 or a variant thereof.

[0341] In some embodiments, the VH and VL of the PD-L1 binding domain is selected from the following VH and VLs, respectively: SEQ ID NOs:89 and 93, SEQ ID NOs:97 and 101, SEQ ID NOs:105 and 109, SEQ ID NOs:113 and 117, SEQ ID NOs:121 and 125, SEQ ID NOs:129 and 133, SEQ ID NOs:137 and 141, SEQ ID NOs:145 and 149, SEQ ID NOs:153 and 157, SEQ ID NOs:161 and 165, SEQ ID NOs:169 and 173, SEQ ID NOs:177 and 181, SEQ ID NOs:185 and 189, SEQ ID NOs:193 and 197, SEQ ID NOs:201 and 205, SEQ ID NOs:209 and 213, SEQ ID NOs:217 and 221, SEQ ID NOs:225 and 229, SEQ ID NOs:233 and 237, SEQ ID NOs:241 and 245, SEQ ID NOs:249 and 253, SEQ ID NOs:257 and 261, SEQ ID NOs:265 and 269, SEQ ID NOs:273 and 277, SEQ ID NOs:281 and 285, SEQ ID NOs:289 and 293, SEQ ID NOs:297 and 301, SEQ ID NOs:305 and 309, SEQ ID NOs:313 and 317, SEQ ID NOs:321 and 325, SEQ ID NOs:329 and 333, SEQ ID NOs:337 and 341, SEQ ID NOs:345 and 349, SEQ ID NOs:353 and 357, SEQ ID NOs:361 and 365, SEQ ID NOs:369 and 373, SEQ ID NOs:374 and 381, SEQ ID NOs:385 and 389, SEQ ID NOs:393 and 397, SEQ ID NOs:401 and 405, SEQ ID NOs:409 and 413, SEQ ID NOs:417 and 421, SEQ ID NOs:425 and 429, SEQ ID NOs:433 and 437, SEQ ID NOs:441 and 445, SEQ ID NOs:449 and 453, SEQ ID NOs:457 and 461, SEQ ID NOs:465 and 469, SEQ ID NOs:473 and 477, SEQ ID NOs:481 and 485, SEQ ID NOs:489 and 493, SEQ ID NOs:497 and 501, SEQ ID NOs:504 and 508, SEQ ID NOs:512 and 516, SEQ ID NOs:520 and 524, SEQ ID NOs:528 and 534, SEQ ID NOs:537 and 541, SEQ ID NOs:545 and 549, SEQ ID NOs:553 and 557 or variants thereof.

[0342] In some embodiments, the 2+1 Fab2-scFv-Fc format antibody binds PD-L1 and CD28. In some embodiments, the scFv of the second monomer of the 2+1 Fab2-scFv-Fc format antibody is a CD28 binding domain and the VH1 of the first and second monomer and the VL1 of the common light chain each form PD-L1 binding domains. In some embodiments, the scFv is α PD-L1 binding domain and the VH1 of the first and second monomer and the VL1 of the common light chain each form CD28 binding domains.

[0343] Any suitable CD28 binding domain can be included in subject 2+1 Fab2-scFv-Fc format antibody, including any of the CD28 binding domains provided herein (see, e.g., FIGS. 18-23 and the Sequence Listing). In some embodiments, the CD28 binding domain is one of the following CD28 binding domains or a variant thereof: 1A7[CD28]_H1L1, 1A7[CD28]_H1.14L1, 1A7[CD28]_L1H1.14, 1A7[CD28]_H1.1L1, 1A7[CD28]_H1L1.71, 1A7[CD28]_H1.14L1.71, 1A7[CD28]_L1.71H1.14, 1A7[CD28]_H1.1L1.71, and HuTN228[CD28]_H1L1 (FIGS. 18-23 and the Sequence Listing).

[0344] In some embodiments of the 2+1 Fab₂-scFv-Fc format antibody, the CD28 binding domain has a variable heavy domain (VH) selected from the group consisting of: SEQ ID NO:998, SEQ ID NO:984, SEQ ID NO:994 and SEQ ID NOs:561-629 or a variant thereof; and a variable light domain (VL) selected from the group consisting of: SEQ ID NO:1002, SEQ ID NO:984, and SEQ ID NOs:630-735 or a variant thereof. In some embodiments, the VH and VL of the CD28 binding domain are selected from the group consisting of: a VH having an amino acid sequence of SEQ ID NO:1030 and a VL having an amino acid sequence of SEQ ID NO:1034; a VH having an amino acid sequence of SEQ ID NO:1006 and a VL having an amino acid sequence of SEQ ID NO:1010; a VH having an amino acid sequence of SEQ ID NO:1014 and a VL having an amino acid sequence of SEQ ID NO:1018; and a VH having an amino acid sequence of SEQ ID NO:1022 and a VL having an amino acid sequence of SEQ ID NO:1026.

[0345] In exemplary embodiments, the CD28 binding domain includes a 1A7[CD28]_H1.14 variable heavy domain. In some embodiments, the CD28 binding domain includes a 1A7[CD28]_H1.14 variable heavy domain or variant thereof and a light variable domain of any of the CD28 binding domains provided herein. In exemplary embodiments, the CD28 binding domain is 1A7[CD28]_H1.14L1.71 or a variant thereof.

[0346] In some embodiments, the CD28 binding domain is selected from one of the following CD28 binding domains CD28.3[CD28]_H0L0, hCD28.3[CD28]_H1L1, 5.11A1[CD28]_H0L0, TGN1412_H1L1, 341VL34[CD28]_H1L1, 341VL36[CD28]_H1L1, 281VL4[CD28]_H1L1, HuTN228[CD28]_H1L1, PV1[CD28]_H0L0, m9.3[CD28]_H0L0, hu9.3[CD28]_H1L1 or a variant thereof.

[0347] In some embodiments, the VH and VL of the CD28 binding domain is selected from the following VH and VLs, respectively: SEQ ID NOs:1 and 5, SEQ ID NOs:9 and 13, SEQ ID NOs:17 and 21, SEQ ID NOs:25 and 29, SEQ ID NOs:33 and 37, SEQ ID NOs:41 and 46, SEQ ID NOs:49 and 53, SEQ ID NOs:57 and 61, SEQ ID NOs:65 and 69, SEQ ID NOs:73 and 77, and SEQ ID NOs:81 and 85. or variants thereof.

[0348] In some embodiments of the anti-PD-L1×anti-CD28 2+1 Fab₂-scFv-Fc format antibody, the VH1 of the first and second monomer and the VL1 of the common light chain of the 2+1 Fab₂-scFv-Fc format antibody each form a binding domain that binds PD-L1. Any suitable PD-L1 binding domain(s) can be included in the subject 2+1 Fab₂-scFv-Fc format antibody, including any of the PD-L1 antigen binding domains provided herein (see, e.g., FIGS. 28-31 and the Sequence Listing). In exemplary embodiments, the PD-L1 binding domain has a VH with an amino acid sequence of SEQ ID NO:1183 and a VL with an amino acid sequence of SEQ ID NO: 1187. In exemplary embodiments, the PD-L1 binding domain has a VH with an amino acid sequence of SEQ ID NO:1042 and a VL with an amino acid sequence of SEQ ID NO:1046. In exemplary embodiments, the PD-L1 binding domain has a VH with an amino acid sequence of SEQ ID NO: 1159 and a VL with an amino acid sequence of SEQ ID NO: 1163.

[0349] FIG. 11 shows some exemplary Fc domain sequences that are useful with the 2+1 Fab2-scFv-Fc format. The “monomer 1” sequences depicted in FIG. 11 typically refer to the Fc domain of the “Fab-Fc heavy chain” and the “monomer 2” sequences refer to the Fc domain of the “Fab-scFv-Fc heavy chain.” In addition, FIGS. 12-15 provides exemplary CH1-hinge domains, CH1 domains, and hinge domains that can be included in the first or second monomer of the 2+1 Fab2-scFv-Fc format. Further, FIG. 16 provides useful CL sequences that can be used with this format.

[0350] Exemplary anti-PD-L1×anti-CD28×antibodies in the 2+1 Fab₂-scFv-Fc format are depicted in FIGS. 36 and 41. In some embodiments, the anti-PD-L1×anti-CD28×antibody is an antibody depicted in FIG. 36 or 41.

### 3. 1+1 CLC Format

[0351] One heterodimeric antibody format that finds particular use in subject bispecific antibodies provided herein (e.g., anti-PD-L1×anti-CD28 antibody) is the “1+1 Common Light Chain” or “1+1 CLC” format, which is depicted in FIG. 26C. The 1+1 CLC format antibody includes a first monomer that includes a VH1-CH1-hinge-CH2-CH3, wherein VH1 is a first variable heavy domain and CH2-CH3 is a first Fc domain; a second monomer that includes a VH2-CH1-hinge-CH2-CH3, wherein VH2 is a second variable heavy domain and CH2-C3 is a second Fc domain; and a third monomer “common light chain” comprising VL-CL, wherein VL is a common variable light domain and CL is a constant light domain. In such embodiments, the VL pairs with the VH1 to form a first binding domain with a first antigen binding specificity; and the VL pairs with the VH2 to form a second binding domain with a second antigen binding specificity. In some embodiments, the 1+1 CLC format antibody is a bivalent antibody.

[0352] In some embodiments, the first and second Fc domains of the 1+1 CLC format are variant Fc domains that include heterodimerization skew variants (e.g., a set of amino acid substitutions as shown in FIGS. 3 and 8). Particularly useful heterodimerization skew variants include S364K/E357Q: L368D/K370S; L368D/K370S: S364K; L368E/K370S: S364K; T411T/E360E/Q362E: D401K; L368D/K370S: S364K/E357L; K370S: S364K/E357Q; T366S/L368A/Y407V: T366W and T366S/L368A/Y407V/Y349C: T366W/S354C (EU numbering). In exemplary embodiments, one of the first or second variant Fc domains includes heterodimerization skew variants L368D/K370S and the other of the first or second variant Fc domains includes heterodimerization skew variants S364K/E357Q, wherein numbering is according to EU numbering. In exemplary embodiments, the first variant Fc domain includes heterodimerization skew variants L368D/K370S and the second variant Fc domain includes heterodimerization skew variants S364K/E357Q, wherein numbering is according to EU numbering.

[0353] In some embodiments, the variant Fc domains include ablation variants (including those shown in FIG. 5). In some embodiments, each of the first and second variant Fc domains include ablation variants E233P/L234V/L235A/G236_/S267K, wherein numbering is according to EU numbering.

[0354] In some embodiments, the constant domain (CH1-hinge-CH2-CH3) of the first or second monomer includes pI variants (including those shown in FIG. 4). In exemplary embodiments, the constant domain (CH1-hinge-CH2-CH3) of the first or second monomer includes pI variants N208D/Q295E/N384D/Q418E/N421D, wherein numbering is according to EU numbering.

[0355] In some embodiments, the 1+1 CLC format antibody provided herein includes FcRn variants M428L/N434S, wherein numbering is according to EU numbering.

[0356] In exemplary embodiments, the first variant Fc domain includes heterodimerization skew variants L368D/K370S and the second variant Fc domain includes heterodimerization skew variants S364K/E357Q; each of the first and second variant Fc domains include ablation variants E233P/L234V/L235A/G236_/S267K; and the constant domain (CH1-hinge-CH2-CH3) of the first monomer includes pI variants N208D/Q295E/N384D/Q418E/N421D, wherein numbering is according to EU numbering. In some embodiments, the 1+1 CLC format antibody provided herein further includes FcRn variants M428L/N434S, wherein numbering is according to EU numbering.

[0357] In some embodiments of the 1+1 CLC format antibody, one of the first or second antigen binding domain is α PD-L1 binding domain. Any suitable PD-L1 binding domain can be included in the subject antibody including those provided herein (FIGS. 28-31 and the Sequence Listing).

[0358] In some embodiments, the PD-L1 binding domain is one of the following PD-L1 binding domains or a variant thereof: 2G4[PDL1]_H1L1, 2G4[PDL]_H1.12_L1.24, 2G4[PDL1]_H1.12_L1.66, 2G4[PDL]_H1.12_L1.68, 2G4[PDL]_H1.12_L1.14, 2G4[PDL1]_H1.4_L1.23, 2G4[PDL]_H1.4_L1.24, 2G4[PDL]_H1.9_L1, 2G4[PDL1]_H1.62_L1.63, 2G4[PDL]_H1.6_L1.3, 2G4[PDL]_H1.61_L1.61, 2G4[PDL1]_H1.60_L1.60, 2G4[PDL]_H1.59_L1.60, 2G4[PDL]_H1.14_L1.26, 2G4[PDL1]_H1_L1.27, 2G4[PDL]_H1.8_L1.26, 2G4[PDL1]_H1_L1.25, 2G4[PDL1]_H1.10_L1.23, 2G4[PDL]_H1.1_L1.1, 2G4[PDL]_H1_L1.29 (FIGS. 28-31 and the Sequence Listing).

[0359] In some embodiments of the 1+1 CLC format antibody, the PD-L1 binding domain has a variable heavy domain (VH) selected from the group consisting of: SEQ ID NO:1079, SEQ ID NO:1042, SEQ ID NO:1055, SEQ ID NO:1059, SEQ ID NO:1063, SEQ ID NO: 1067, SEQ ID NO: 1071, SEQ ID NO: 1075, SEQ ID NO:1083, SEQ ID NO:1087, SEQ ID NO:1091, SEQ ID NO:1095, and SEQ ID NO:1099; and a variable light domain (VL) selected from the group consisting of: SEQ ID NO:1111, SEQ ID NO:1046, SEQ ID NO: 1103, SEQ ID NO: 1107, SEQ ID NO: 1115, SEQ ID NO: 1119, SEQ ID NO: 1123, SEQ ID NO: 1127, SEQ ID NO:1131, SEQ ID NO: 1135, SEQ ID NO: 1139, SEQ ID NO: 1143, SEQ ID NO: 1147, SEQ ID NO:1151, SEQ ID NO: 1155, and SEQ ID NOs:798-868. In some embodiments, the VH and VL of the PD-L1 binding domain are selected from the group consisting of: a VH having an amino acid sequence of SEQ ID NO:1183 and a VL having an amino acid sequence of SEQ ID NO:1187; a VH having an amino acid of SEQ ID NO:1042 and a VL having an amino acid sequence of SEQ ID NO:1047; a VH having an amino acid sequence of SEQ ID NO: 1159 and a VL having an amino acid sequence of SEQ ID NO:1163; a VH having an amino acid sequence of SEQ ID NO:1167 and a VL having an amino acid sequence of SEQ ID NO:1171; a VH having an amino acid sequence of SEQ ID NO:1175 and a VL having an amino acid sequence of SEQ ID NO:1179; a VH having an amino acid sequence of SEQ ID NO:1191 and a VL having an amino acid sequence of SEQ ID NO:1195; a VH having an amino acid sequence of SEQ ID NO:1199 and a VL having an amino acid sequence of SEQ ID NO:1203; a VH having an amino acid sequence of SEQ ID NO:1207 and a VL having an amino acid sequence of SEQ ID NO:1211; a VH having an amino acid sequence of SEQ ID NO:1215 and a VL having an amino acid sequence of SEQ ID NO:1219; a VH having an amino acid sequence of SEQ ID NO:1223 and a VL having an amino acid sequence of SEQ ID NO:1227; a VH having an amino acid sequence of SEQ ID NO:1231 and a VL having an amino acid sequence of SEQ ID NO:1235; a VH having an amino acid sequence of SEQ ID NO:1239 and a VL having an amino acid sequence of SEQ ID NO:1243; a VH having an amino acid sequence of SEQ ID NO:1247 and a VL having an amino acid sequence of SEQ ID NO:1251; a VH having an amino acid sequence of SEQ ID NO:1255 and a VL having an amino acid sequence of SEQ ID NO:1259; a VH having an amino acid sequence of SEQ ID NO:1263 and a VL having an amino acid sequence of SEQ ID NO:1267; a VH having an amino acid sequence of SEQ ID NO:1271 and a VL having an amino acid sequence of SEQ ID NO:1275; a VH having an amino acid sequence of SEQ ID NO:1279 and a VL having an amino acid sequence of SEQ ID NO:1283; a VH having an amino acid sequence of SEQ ID NO:1287 and a VL having an amino acid sequence of SEQ ID NO:1291; a VH having an amino acid sequence of SEQ ID NO:1295 and a VL having an amino acid sequence of SEQ ID NO:1299; and a VH having an amino acid sequence of SEQ ID NO:1303 and a VL having an amino acid sequence of SEQ ID NO:1307.

[0360] In some embodiments, the PD-L1 binding domain is selected from one of the following PD-L1 binding domains: 2.14H9 OPT, atezolizumab, avelumab, 12A4, 3G10, 10A5, h3D10 Var1, h3D10 Var2, h3D10 Var3, h3D10 Var4, h3D10 Var5, h3D10 Var6, h3D10 Var7, h3D10 Var8, h3D10 Var9, h3D10 Var10, h3D10 Var1 1, h3D10 Var12, h3D10 Var13, h3D10 Var14, Antibody A, C5H9v2, Humanized 29E.2A3, 1B9, 4H1, mAb-42, BAP058-03, BAP058-04, BAP058-06, BAP058-07, BAP058-11, BAP058-13, H6, RC5, SH1A1Q, SH1B3, SH1D1, SH1D2, SH1D12, SH1E1, SH1G9, SH1E6, SH1A2, SH1B1, H6B1L, H6A1, H6B1, H6B2, G12, RSA1, RA3, SH1E2, SH1E4, SH1B11, SH1C8, H1H9364P2, H1H9373P2, H1H8314N, PDL1.3.1 or a variant thereof.

[0361] In some embodiments, the VH and VL of the PD-L1 binding domain is selected from the following VH and VLs, respectively: SEQ ID NOs:89 and 93, SEQ ID NOs:97 and 101, SEQ ID NOs:105 and 109, SEQ ID NOs:113 and 117, SEQ ID NOs:121 and 125, SEQ ID NOs:129 and 133, SEQ ID NOs:137 and 141, SEQ ID NOs:145 and 149, SEQ ID NOs:153 and 157, SEQ ID NOs:161 and 165, SEQ ID NOs:169 and 173, SEQ ID NOs:177 and 181, SEQ ID NOs:185 and 189, SEQ ID NOs:193 and 197, SEQ ID NOs:201 and 205, SEQ ID NOs:209 and 213, SEQ ID NOs:217 and 221, SEQ ID NOs:225 and 229, SEQ ID NOs:233 and 237, SEQ ID NOs:241 and 245, SEQ ID NOs:249 and 253, SEQ ID NOs:257 and 261, SEQ ID NOs:265 and 269, SEQ ID NOs:273 and 277, SEQ ID NOs:281 and 285, SEQ ID NOs:289 and 293, SEQ ID NOs:297 and 301, SEQ ID NOs:305 and 309, SEQ ID NOs:313 and 317, SEQ ID NOs:321 and 325, SEQ ID NOs:329 and 333, SEQ ID NOs:337 and 341, SEQ ID NOs:345 and 349, SEQ ID NOs:353 and 357, SEQ ID NOs:361 and 365, SEQ ID NOs:369 and 373, SEQ ID NOs:374 and 381, SEQ ID NOs:385 and 389, SEQ ID NOs:393 and 397, SEQ ID NOs:401 and 405, SEQ ID NOs:409 and 413, SEQ ID NOs:417 and 421, SEQ ID NOs:425 and 429, SEQ ID NOs:433 and 437, SEQ ID NOs:441 and 445, SEQ ID NOs:449 and 453, SEQ ID NOs:457 and 461, SEQ ID NOs:465 and 469, SEQ ID NOs:473 and 477, SEQ ID NOs:481 and 485, SEQ ID NOs:489 and 493, SEQ ID NOs:497 and 501, SEQ ID NOs:504 and 508, SEQ ID NOs:512 and 516, SEQ ID NOs:520 and 524, SEQ ID NOs:528 and 534, SEQ ID NOs:537 and 541, SEQ ID NOs:545 and 549, SEQ ID NOs:553 and 557 or variants thereof.

[0362] In some embodiments, the 1+1 CLC format antibody is a bispecific antibody that binds PD-L1 and CD28. In some embodiments, one of the first binding domain or the second binding domain binds CD28 and the other binding domain binds PD-L1. Any suitable CD28 binding domain can be included in subject 1+1 CLC format antibody, including any of the CD28 binding domains provided herein. In some embodiments, the CD28 binding domain is one of the following CD28 binding domains or a variant thereof: 1A7[CD28]_H11, 1A7[CD28]_H1.14L1, 1A7[CD28]_L1H1.14, 1A7[CD28]_H1.1L1, 1A7[CD28]_H1L1.71, 1A7[CD28]_H1.14L1.71, 1A7[CD28]_L1.71H1.14, 1A7[CD28]_H1.1L1.71, and HuTN228[CD28]_H1L1 (FIGS. 18-23 and the Sequence Listing).

[0363] In some embodiments of the 1+1 CLC format antibody, the CD28 binding domain has a variable heavy domain (VH) selected from the group consisting of: SEQ ID NO:998, SEQ ID NO:984, SEQ ID NO:994 and SEQ ID NOs:561-629 or a variant thereof; and a variable light domain (VL) selected from the group consisting of: SEQ ID NO:1002, SEQ ID NO:984, and SEQ ID NOs:630-735 or a variant thereof. In some embodiments, the VH and VL of the CD28 binding domain are selected from the group consisting of: a VH having an amino acid sequence of SEQ ID NO:1030 and a VL having an amino acid sequence of SEQ ID NO:1034; a VH having an amino acid sequence of SEQ ID NO:1006 and a VL having an amino acid sequence of SEQ ID NO:1010; a VH having an amino acid sequence of SEQ ID NO:1014 and a VL having an amino acid sequence of SEQ ID NO:1018; and a VH having an amino acid sequence of SEQ ID NO:1022 and a VL having an amino acid sequence of SEQ ID NO:1026.

[0364] In exemplary embodiments, the CD28 binding domain includes a 1A7[CD28]_H1.14 variable heavy domain. In some embodiments, the CD28 binding domain includes a 1A7[CD28]_H1.14 variable heavy domain or variant thereof and a light variable domain of any of the CD28 binding domains provided herein. In exemplary embodiments, the CD28 binding domain is 1A7[CD28]_H1.14L1.71 or a variant thereof.

[0365] In some embodiments, the CD28 binding domain is selected from one of the following CD28 binding domains CD28.3[CD28]_H0L0, hCD28.3[CD28]_H1L1, 5.11A1[CD28]_H0L0, TGN1412_H1L1, 341VL34[CD28]_H1L1, 341VL36[CD28]_H1L1, 281VL4[CD28]_H1L1, HuTN228[CD28]_H1L1, PV1[CD28]_H0L0, m9.3[CD28]_H0L0, hu9.3[CD28]_H1L1 or a variant thereof.

[0366] In some embodiments, the VH and VL of the CD28 binding domain is selected from the following VH and VLs, respectively: SEQ ID NOs:1 and 5, SEQ ID NOs:9 and 13, SEQ ID NOs:17 and 21, SEQ ID NOs:25 and 29, SEQ ID NOs:33 and 37, SEQ ID NOs:41 and 46, SEQ ID NOs:49 and 53, SEQ ID NOs:57 and 61, SEQ ID NOs:65 and 69, SEQ ID NOs:73 and 77, and SEQ ID NOs:81 and 85. or variants thereof.

[0367] In some embodiments, one of the first binding domain or the second binding domain of the 1+1 CLC format antibody binds PD-L1. Any suitable PD-L1 antigen binding domain can be included, including those described herein (see, e.g., FIGS. 28-31 and the Sequence Listing). In some embodiments, the 1+1 CLC format antibody includes α PD-L1 antigen binding domain that includes a variable heavy domain of one of the PD-L1 antigen binding domains provided herein (see, e.g., FIGS. 28-31 and the Sequence Listing). In exemplary embodiments, the PD-L1 binding domain has a VH with an amino acid sequence of SEQ ID NO: 1183 and a VL with an amino acid sequence of SEQ ID NO: 1187. In exemplary embodiments, the PD-L1 binding domain has a VH with an amino acid sequence of SEQ ID NO:1042 and a VL with an amino acid sequence of SEQ ID NO:1046. In exemplary embodiments, the PD-L1 binding domain has a VH with an amino acid sequence of SEQ ID NO: 1159 and a VL with an amino acid sequence of SEQ ID NO: 1163.

### 4. 2+1 CLC Format

[0368] Another heterodimeric antibody format that finds particular use in subject bispecific antibodies provided herein (e.g., anti-PD-L1×anti-CD28 antibody) is the “2+1 Common Light Chain” or “2+1 CLC” format, which is depicted in FIG. 26D. The 2+1 CLC format includes a first monomer that includes a VH1-CH1-linker-VH1-CH1-hinge-CH2-CH3, wherein the VH1s are each a first variable heavy domain and CH2-CH3 is a first Fc domain; a second monomer that includes a VH2-CH1-hinge-CH2-CH3, wherein VH2 is a second variable heavy domain and CH2-CH3 is a second Fc domain; and a third monomer that includes a “common light chain” VL-CL, wherein VL is a common variable light domain and CL is a constant light domain. The VL pairs with each of the VH1s of the first monomer to form two first binding domains, each with a first antigen binding specificity; and the VL pairs with the VH2 to form a second binding domain with a second antigen binding specificity. The linker of the first monomer can be any suitable linker, including any one of the domain linkers or combinations thereof described in FIG. 7. In some embodiments, the linker is EPKSCGKPGSGKPGS (SEQ ID NO:936). In some embodiments, the 2+1 CLC format antibody is a trivalent antibody.

[0369] In some embodiments, the first and second Fc domains of the 2+1 CLC format are variant Fc domains that include heterodimerization skew variants (e.g., a set of amino acid substitutions as shown in FIGS. 3 and 8). Particularly useful heterodimerization skew variants include S364K/E357Q: L368D/K370S; L368D/K370S: S364K; L368E/K370S: S364K; T411T/E360E/Q362E: D401K; L368D/K370S: S364K/E357L; K370S: S364K/E357Q; T366S/L368A/Y407V: T366W and T366S/L368A/Y407V/Y349C: T366W/S354C (EU numbering)). In exemplary embodiments, one of the first or second variant Fc domains includes heterodimerization skew variants L368D/K370S and the other of the first or second variant Fc domains includes heterodimerization skew variants S364K/E357Q, wherein numbering is according to EU numbering. In exemplary embodiments, the first variant Fc domain includes heterodimerization skew variants L368D/K370S and the second variant Fc domain includes heterodimerization skew variants S364K/E357Q, wherein numbering is according to EU numbering.

[0370] In some embodiments, the variant Fc domains include ablation variants (including those shown in FIG. 5). In some embodiments, each of the first and second variant Fc domains include ablation variants E233P/L234V/L235A/G236_/S267K, wherein numbering is according to EU numbering.

[0371] In some embodiments, the constant domain (CH1-hinge-CH2-CH3) of the first or second monomer includes pI variants (including those shown in FIG. 4). In exemplary embodiments, the constant domain (CH1-hinge-CH2-CH3) of the first or second monomer includes pI variants N208D/Q295E/N384D/Q418E/N421D, wherein numbering is according to EU numbering.

[0372] In some embodiments, the 2+1 CLC format antibody provided herein further includes FcRn variants M428L/N434S, wherein numbering is according to EU numbering.

[0373] In exemplary embodiments, the first variant Fc domain includes heterodimerization skew variants L368D/K370S and the second variant Fc domain includes heterodimerization skew variants S364K/E357Q; each of the first and second variant Fc domains include ablation variants E233P/L234V/L235A/G236_/S267K; and the constant domain (CH1-hinge-CH2-CH3) of the first monomer includes pI variants N208D/Q295E/N384D/Q418E/N421D, wherein numbering is according to EU numbering. In some embodiments, the 2+1 CLC format antibody provided herein further includes FcRn variants M428L/N434S, wherein numbering is according to EU numbering.

[0374] In some embodiments of the 2+1 CLC format antibody, each of the two first binding domains is α PD-L1 binding domain. In some embodiments, the second binding domain is α PD-L1 binding domain. Any suitable PD-L1 binding domain can be included in the subject antibody including those provided herein (see, e.g., FIGS. 28-31 and the Sequence Listing).

[0375] In some embodiments, the PD-L1 binding domain is one of the following PD-L1 binding domains or a variant thereof: 2G4[PDL1]_H1L1, 2G4[PDL1]_H1.12_L1.24, 2G4[PDL1]_H1.12_L1.66, 2G4[PDL]_H1.12_L1.68, 2G4[PDL1]_H1.12_L1.14, 2G4[PDL1]_H1.4_L1.23, 2G4[PDL1]_H1.4_L1.24, 2G4[PDL1]_H1.9_L1, 2G4[PDL1]_H1.62_L1.63, 2G4[PDL1]_H1.6_L1.3, 2G4[PDL1]_H1.61_L1.61, 2G4[PDL1]_H1.60_L1.60, 2G4[PDL1]_H1.59_L1.60, 2G4[PDL]_H1.14_L1.26, 2G4[PDL1]_H1_L1.27, 2G4[PDL1]_H1.8_L1.26, 2G4[PDL1]_H1_L1.25, 2G4[PDL1]_H1.10_L1.23, 2G4[PDL1]_H1.1_L1.1, 2G4[PDL1]_H1_L1.29 (FIGS. 28-31 and the Sequence Listing).

[0376] In some embodiments of the 2+1 CLC format antibody, the PD-L1 binding domain has a variable heavy domain (VH) selected from the group consisting of: SEQ ID NO:1079, SEQ ID NO:1042, SEQ ID NO:1055, SEQ ID NO:1059, SEQ ID NO:1063, SEQ ID NO: 1067, SEQ ID NO: 1071, SEQ ID NO: 1075, SEQ ID NO:1083, SEQ ID NO:1087, SEQ ID NO:1091, SEQ ID NO:1095, SEQ ID NO:1099, and SEQ ID NOs:736-797 or a variant thereof; and a variable light domain (VL) selected from the group consisting of: SEQ ID NO:1111, SEQ ID NO:1046, SEQ ID NO: 1103, SEQ ID NO: 1107, SEQ ID NO: 1115, SEQ ID NO: 1119, SEQ ID NO: 1123, SEQ ID NO: 1127, SEQ ID NO:1131, SEQ ID NO: 1135, SEQ ID NO: 1139, SEQ ID NO: 1143, SEQ ID NO: 1147, SEQ ID NO:1151, SEQ ID NO: 1155, and SEQ ID NOs:798-868 or a variant thereof. In some embodiments, the VH and VL of the PD-L1 binding domain are selected from the group consisting of: a VH having an amino acid sequence of SEQ ID NO:1183 and a VL having an amino acid sequence of SEQ ID NO:1187; a VH having an amino acid of SEQ ID NO:1042 and a VL having an amino acid sequence of SEQ ID NO:1047; a VH having an amino acid sequence of SEQ ID NO: 1159 and a VL having an amino acid sequence of SEQ ID NO: 1163; a VH having an amino acid sequence of SEQ ID NO: 1167 and a VL having an amino acid sequence of SEQ ID NO:1171; a VH having an amino acid sequence of SEQ ID NO:1175 and a VL having an amino acid sequence of SEQ ID NO:1179; a VH having an amino acid sequence of SEQ ID NO:1191 and a VL having an amino acid sequence of SEQ ID NO: 1195; a VH having an amino acid sequence of SEQ ID NO: 1199 and a VL having an amino acid sequence of SEQ ID NO:1203; a VH having an amino acid sequence of SEQ ID NO:1207 and a VL having an amino acid sequence of SEQ ID NO:1211; a VH having an amino acid sequence of SEQ ID NO:1215 and a VL having an amino acid sequence of SEQ ID NO:1219; a VH having an amino acid sequence of SEQ ID NO:1223 and a VL having an amino acid sequence of SEQ ID NO:1227; a VH having an amino acid sequence of SEQ ID NO:1231 and a VL having an amino acid sequence of SEQ ID NO:1235; a VH having an amino acid sequence of SEQ ID NO:1239 and a VL having an amino acid sequence of SEQ ID NO:1243; a VH having an amino acid sequence of SEQ ID NO:1247 and a VL having an amino acid sequence of SEQ ID NO:1251; a VH having an amino acid sequence of SEQ ID NO:1255 and a VL having an amino acid sequence of SEQ ID NO:1259; a VH having an amino acid sequence of SEQ ID NO:1263 and a VL having an amino acid sequence of SEQ ID NO:1267; a VH having an amino acid sequence of SEQ ID NO:1271 and a VL having an amino acid sequence of SEQ ID NO:1275; a VH having an amino acid sequence of SEQ ID NO:1279 and a VL having an amino acid sequence of SEQ ID NO:1283; a VH having an amino acid sequence of SEQ ID NO:1287 and a VL having an amino acid sequence of SEQ ID NO:1291; a VH having an amino acid sequence of SEQ ID NO:1295 and a VL having an amino acid sequence of SEQ ID NO:1299; and a VH having an amino acid sequence of SEQ ID NO:1303 and a VL having an amino acid sequence of SEQ ID NO:1307.

[0377] In some embodiments, the PD-L1 binding domain is selected from one of the following PD-L1 binding domains: 2.14H9 OPT, atezolizumab, avelumab, 12A4, 3G10, 10A5, h3D10 Var1, h3D10 Var2, h3D10 Var3, h3D10 Var4, h3D10 Var5, h3D10 Var6, h3D10 Var7, h3D10 Var8, h3D10 Var9, h3D10 Var10, h3D10 Var1 1, h3D10 Var12, h3D10 Var13, h3D10 Var14, Antibody A, C5H9v2, Humanized 29E.2A3, 1B9, 4H1, mAb-42, BAP058-03, BAP058-04, BAP058-06, BAP058-07, BAP058-11, BAP058-13, H6, RC5, SH1A1Q, SH1B3, SH1D1, SH1D2, SH1D12, SH1E1, SH1G9, SH1E6, SH1A2, SH1B1, H6B1L, H6A1, H6B1, H6B2, G12, RSA1, RA3, SH1E2, SH1E4, SH1B11, SH1C8, H1H9364P2, H1H9373P2, H1H8314N, PDL1.3.1 or a variant thereof.

[0378] In some embodiments, the VH and VL of the PD-L1 binding domain is selected from the following VH and VLs, respectively: SEQ ID NOs:89 and 93, SEQ ID NOs:97 and 101, SEQ ID NOs:105 and 109, SEQ ID NOs:113 and 117, SEQ ID NOs:121 and 125, SEQ ID NOs:129 and 133, SEQ ID NOs:137 and 141, SEQ ID NOs:145 and 149, SEQ ID NOs:153 and 157, SEQ ID NOs:161 and 165, SEQ ID NOs:169 and 173, SEQ ID NOs:177 and 181, SEQ ID NOs:185 and 189, SEQ ID NOs:193 and 197, SEQ ID NOs:201 and 205, SEQ ID NOs:209 and 213, SEQ ID NOs:217 and 221, SEQ ID NOs:225 and 229, SEQ ID NOs:233 and 237, SEQ ID NOs:241 and 245, SEQ ID NOs:249 and 253, SEQ ID NOs:257 and 261, SEQ ID NOs:265 and 269, SEQ ID NOs:273 and 277, SEQ ID NOs:281 and 285, SEQ ID NOs:289 and 293, SEQ ID NOs:297 and 301, SEQ ID NOs:305 and 309, SEQ ID NOs:313 and 317, SEQ ID NOs:321 and 325, SEQ ID NOs:329 and 333, SEQ ID NOs:337 and 341, SEQ ID NOs:345 and 349, SEQ ID NOs:353 and 357, SEQ ID NOs:361 and 365, SEQ ID NOs:369 and 373, SEQ ID NOs:374 and 381, SEQ ID NOs:385 and 389, SEQ ID NOs:393 and 397, SEQ ID NOs:401 and 405, SEQ ID NOs:409 and 413, SEQ ID NOs:417 and 421, SEQ ID NOs:425 and 429, SEQ ID NOs:433 and 437, SEQ ID NOs:441 and 445, SEQ ID NOs:449 and 453, SEQ ID NOs:457 and 461, SEQ ID NOs:465 and 469, SEQ ID NOs:473 and 477, SEQ ID NOs:481 and 485, SEQ ID NOs:489 and 493, SEQ ID NOs:497 and 501, SEQ ID NOs:504 and 508, SEQ ID NOs:512 and 516, SEQ ID NOs:520 and 524, SEQ ID NOs:528 and 534, SEQ ID NOs:537 and 541, SEQ ID NOs:545 and 549, SEQ ID NOs:553 and 557 or variants thereof.

[0379] In some embodiments, the 2+1 CLC format antibody is a bispecific antibody that binds PD-L1 and CD28. In some embodiments, each of the two first binding domains binds PD-L1 and the second binding domain binds CD28. In some embodiments, each of the two first binding domains binds CD28 and the second binding domain binds PD-L1. Any suitable CD28 binding domain can be included in the subject 2+1 CLC format antibody, including any of the CD28 binding domains provided herein. In some embodiments, the CD28 binding domain is one of the following CD28 binding domains or a variant thereof: 1A7[CD28]_H11, 1A7[CD28]_H1.14L1, 1A7[CD28]_L1H1.14, 1A7[CD28]_H1.1L1, 1A7[CD28]_H1L1.71, 1A7[CD28]_H1.14L1.71, 1A7[CD28]_L1.71H1.14, 1A7[CD28]_H1.1L1.71, and HuTN228[CD28]_H1L1 (see, e.g., FIGS. 18-23 and the Sequence Listing). In some embodiments of the 2+1 CLC format antibody, the CD28 binding domain has a variable heavy domain (VH) selected from the group consisting of: SEQ ID NO:998, SEQ ID NO:984, SEQ ID NO:994 and SEQ ID NOs:561-629 or a variant thereof; and a variable light domain (VL) selected from the group consisting of: SEQ ID NO:1002, SEQ ID NO:984, and SEQ ID NOs:630-735 or a variant thereof. In some embodiments, the VH and VL of the CD28 binding domain are selected from the group consisting of: a VH having an amino acid sequence of SEQ ID NO:1030 and a VL having an amino acid sequence of SEQ ID NO:1034; a VH having an amino acid sequence of SEQ ID NO:1006 and a VL having an amino acid sequence of SEQ ID NO:1010; a VH having an amino acid sequence of SEQ ID NO:1014 and a VL having an amino acid sequence of SEQ ID NO:1018; and a VH having an amino acid sequence of SEQ ID NO:1022 and a VL having an amino acid sequence of SEQ ID NO:1026.

[0380] In exemplary embodiments, the CD28 binding domain includes a 1A7[CD28]_H1.14 variable heavy domain. In some embodiments, the CD28 binding domain includes a 1A7[CD28]_H1.14 variable heavy domain or variant thereof and a light variable domain of any of the CD28 binding domains provided herein. In exemplary embodiments, the CD28 binding domain is 1A7[CD28]_H1.14L1.71 or a variant thereof.

[0381] In some embodiments, the CD28 binding domain is selected from one of the following CD28 binding domains CD28.3[CD28]_H0L0, hCD28.3[CD28]_H1L1, 5.11A1[CD28]_H0L0, TGN1412_H1L1, 341VL34[CD28]_H1L1, 341VL36[CD28]_H1L1, 281VL4[CD28]_H1L1, HuTN228[CD28]_H1L1, PV1[CD28]_H0L0, m9.3[CD28]_H0L0, hu9.3[CD28]_H1L1 or a variant thereof.

[0382] In some embodiments, the VH and VL of the CD28 binding domain is selected from the following VH and VLs, respectively: SEQ ID NOs:1 and 5, SEQ ID NOs:9 and 13, SEQ ID NOs:17 and 21, SEQ ID NOs:25 and 29, SEQ ID NOs:33 and 37, SEQ ID NOs:41 and 46, SEQ ID NOs:49 and 53, SEQ ID NOs:57 and 61, SEQ ID NOs:65 and 69, SEQ ID NOs:73 and 77, and SEQ ID NOs:81 and 85. or variants thereof.

[0383] Any suitable PD-L1 binding domain can be included in the subject anti-PD-L1×anti-CD28 2+1 CLC format antibody, including any of the PD-L1 antigen binding domains provided herein (see, e.g., FIGS. 28-31 and the Sequence Listing). In exemplary embodiments, the PD-L1 binding domain(s) has a VH with an amino acid sequence of SEQ ID NO:1183 and a VL with an amino acid sequence of SEQ ID NO:1187. In exemplary embodiments, the PD-L1 binding domain has a VH with an amino acid sequence of SEQ ID NO:1042 and a VL with an amino acid sequence of SEQ ID NO:1046. In exemplary embodiments, the PD-L1 binding domain has a VH with an amino acid sequence of SEQ ID NO: 1159 and a VL with an amino acid sequence of SEQ ID NO: 1163.

[0384] FIG. 13 depicts sequences for “CH1+half hinge” domain linker that find use in embodiments of the 2+1 CLC format. In the 2+1 CLC format, the “CH1+half hinge” sequences find use linking the first variable heavy domain (VH) to the second V_{H} domain on the Fab-Fab-Fc side of the bispecific antibody.

5. 2+1 mAb-scFv Format

[0385] One heterodimeric antibody format that finds particular use in the subject bispecific antibodies provided herein (e.g., anti-PD-L1×anti-CD28 antibody) is the 2+1 mAb-scFv format shown in FIG. 26E. This antibody format includes three antigen binding domains: two Fab portions and an scFv that is attached to the C-terminal of one of the heavy chains. In some embodiments of this format, the Fab portions each bind PD-L1. In some embodiments, the “extra” scFv domain binds CD28. That is, this mAb-scFv format is a trivalent antibody.

[0386] In these embodiments, the first chain or monomer comprises, from N- to C-terminal, VH1-CH1-hinge-CH2-CH3, the second monomer comprises, from N- to C-terminal, VH1-CH1-hinge-CH2-CH3-domain linker-scFv domain, where the scFv domain comprises a second VH (VH2), a second VL (VL2) and a scFv linker. As for all the scFv domains herein, the scFv domain can be in either orientation, from N- to C-terminal, VH2-scFv linker-VL2 or VL2-scFv linker-VH2. Accordingly, the second monomer may comprise, from N- to C-terminal, VH1-CH1-hinge-CH2-CH3-domain linker-VH2-scFv linker-VL2 or VH1-CH1-hinge-CH2-CH3-domain linker-VL2-scFv linker-VH2. The composition also comprises a light chain, VL1-CL. In these embodiments, the VH1-VL1 each form a first ABD and the VH2-VL2 form a second ABD. In some embodiments, the first ABD binds to a tumor target antigen, including human B7H3, and the second ABD binds human CD28.

[0387] In some embodiments, the first and second Fc domains of the 2+1 mAb-scFv format antibody are variant Fc domains that include heterodimerization skew variants (e.g., a set of amino acid substitutions as shown in FIGS. 3 and 9). Particularly useful heterodimerization skew variants include S364K/E357Q: L368D/K370S; L368D/K370S: S364K; L368E/K370S: S364K; T411T/E360E/Q362E: D401K; L368D/K370S: S364K/E357L; K370S: S364K/E357Q; T366S/L368A/Y407V: T366W and T366S/L368A/Y407V/Y349C: T366W/S354C (EU numbering)). In exemplary embodiments, one of the first or second variant Fc domains includes heterodimerization skew variants L368D/K370S and the other of the first or second variant Fc domains includes heterodimerization skew variants S364K/E357Q, wherein numbering is according to EU numbering. In exemplary embodiments, the first variant Fc domain includes heterodimerization skew variants L368D/K370S and the second variant Fc domain includes heterodimerization skew variants S364K/E357Q, wherein numbering is according to EU numbering.

[0388] In some embodiments, the variant Fc domains include ablation variants (including those shown in FIG. 5). In some embodiments, each of the first and second variant Fc domains include ablation variants E233P/L234V/L235A/G236_/S267K, wherein numbering is according to EU numbering.

[0389] In some embodiments, the constant domain (CH1-hinge-CH2-CH3) of the first monomer includes pI variants (including those shown in FIG. 4). In exemplary embodiments, the constant domain (CH1-hinge-CH2-CH3) of the first monomer includes pI variants N208D/Q295E/N384D/Q418E/N421D, wherein numbering is according to EU numbering.

[0390] In some embodiments, the scFv of the 2+1 mAb-scFv format antibody provided herein includes a charged scFv linker (including those shown in FIG. 6). In some embodiments, the 2+1 mAb-scFv format antibody provided herein includes FcRn variants M428L/N434S, wherein numbering is according to EU numbering.

[0391] In exemplary embodiments, the first variant Fc domain includes heterodimerization skew variants L368D/K370S and the second variant Fc domain includes heterodimerization skew variants S364K/E357Q; each of the first and second variant Fc domains include ablation variants E233P/L234V/L235A/G236_/S267K; and the constant domain (CH1-hinge-CH2-CH3) of the first monomer includes pI variants N208D/Q295E/N384D/Q418E/N421D, wherein numbering is according to EU numbering. In some embodiments, the scFv of the 2+1 mAb-scFv format antibody provided herein includes a (GKPGS)₄ charged scFv linker. In some embodiments, 2+1 mAb-scFv format antibody provided herein includes FcRn variants M428L/N434S, wherein numbering is according to EU numbering.

[0392] In some embodiments of the 2+1 mAb-scFv, the VH1 of the first and second monomer and the VL1 of the common light chain each form α PD-L1 binding domain. In some embodiments, the scFv of the second monomer is α PD-L1 binding domain.

[0393] In some embodiments, the PD-L1 binding domain is one of the following PD-L1 binding domains or a variant thereof: 2G4[PDL1]_H1L1, 2G4[PDL]_H1.12_L1.24, 2G4[PDL1]_H1.12_L1.66, 2G4[PDL]_H1.12_L1.68, 2G4[PDL1]_H1.12_L1.14, 2G4[PDL1]_H1.4_L1.23, 2G4[PDL1]_H1.4_L1.24, 2G4[PDL1]_H1.9_L1, 2G4[PDL1]_H1.62_L1.63, 2G4[PDL1]_H1.6_L1.3, 2G4[PDL1]_H1.61_L1.61, 2G4[PDL1]_H1.60_L1.60, 2G4[PDL1]_H1.59_L1.60, 2G4[PDL1]_H1.14_L1.26, 2G4[PDL1]_H1_L1.27, 2G4[PDL1]_H1.8_L1.26, 2G4[PDL1]_H1_L1.25, 2G4[PDL1]_H1.10_L1.23, 2G4[PDL1]_H1.1_L1.1, 2G4[PDL1]_H1_L1.29 (FIGS. 28-31 and the Sequence Listing).

[0394] In some embodiments of the 1+1 Fab-scFv-Fc format, the PD-L1 binding domain has a variable heavy domain (VH) selected from the group consisting of: SEQ ID NO:1079, SEQ ID NO:1042, SEQ ID NO:1055, SEQ ID NO:1059, SEQ ID NO:1063, SEQ ID NO: 1067, SEQ ID NO: 1071, SEQ ID NO: 1075, SEQ ID NO:1083, SEQ ID NO:1087, SEQ ID NO:1091, SEQ ID NO:1095, SEQ ID NO:1099, and SEQ ID NOs:736-797 or a variant thereof; and a variable light domain (VL) selected from the group consisting of: SEQ ID NO:1111, SEQ ID NO:1046, SEQ ID NO: 1103, SEQ ID NO: 1107, SEQ ID NO: 1115, SEQ ID NO: 1119, SEQ ID NO: 1123, SEQ ID NO: 1127, SEQ ID NO:1131, SEQ ID NO: 1135, SEQ ID NO: 1139, SEQ ID NO: 1143, SEQ ID NO: 1147, SEQ ID NO:1151, SEQ ID NO: 1155, and SEQ ID NOs:798-868 or a variant thereof. In some embodiments, the VH and VL of the PD-L1 binding domain are selected from the group consisting of: a VH having an amino acid sequence of SEQ ID NO:1183 and a VL having an amino acid sequence of SEQ ID NO:1187; a VH having an amino acid of SEQ ID NO:1042 and a VL having an amino acid sequence of SEQ ID NO:1047; a VH having an amino acid sequence of SEQ ID NO:1159 and a VL having an amino acid sequence of SEQ ID NO: 1163; a VH having an amino acid sequence of SEQ ID NO: 1167 and a VL having an amino acid sequence of SEQ ID NO:1171; a VH having an amino acid sequence of SEQ ID NO:1175 and a VL having an amino acid sequence of SEQ ID NO:1179; a VH having an amino acid sequence of SEQ ID NO:1191 and a VL having an amino acid sequence of SEQ ID NO: 1195; a VH having an amino acid sequence of SEQ ID NO: 1199 and a VL having an amino acid sequence of SEQ ID NO:1203; a VH having an amino acid sequence of SEQ ID NO:1207 and a VL having an amino acid sequence of SEQ ID NO:1211; a VH having an amino acid sequence of SEQ ID NO:1215 and a VL having an amino acid sequence of SEQ ID NO:1219; a VH having an amino acid sequence of SEQ ID NO:1223 and a VL having an amino acid sequence of SEQ ID NO:1227; a VH having an amino acid sequence of SEQ ID NO:1231 and a VL having an amino acid sequence of SEQ ID NO:1235; a VH having an amino acid sequence of SEQ ID NO:1239 and a VL having an amino acid sequence of SEQ ID NO:1243; a VH having an amino acid sequence of SEQ ID NO:1247 and a VL having an amino acid sequence of SEQ ID NO:1251; a VH having an amino acid sequence of SEQ ID NO:1255 and a VL having an amino acid sequence of SEQ ID NO:1259; a VH having an amino acid sequence of SEQ ID NO:1263 and a VL having an amino acid sequence of SEQ ID NO:1267; a VH having an amino acid sequence of SEQ ID NO:1271 and a VL having an amino acid sequence of SEQ ID NO:1275; a VH having an amino acid sequence of SEQ ID NO:1279 and a VL having an amino acid sequence of SEQ ID NO:1283; a VH having an amino acid sequence of SEQ ID NO:1287 and a VL having an amino acid sequence of SEQ ID NO:1291; a VH having an amino acid sequence of SEQ ID NO:1295 and a VL having an amino acid sequence of SEQ ID NO:1299; and a VH having an amino acid sequence of SEQ ID NO:1303 and a VL having an amino acid sequence of SEQ ID NO:1307.

[0395] In some embodiments, the PD-L1 binding domain is selected from one of the following PD-L1 binding domains: 2.14H9 OPT, atezolizumab, avelumab, 12A4, 3G10, 10A5, h3D10 Var1, h3D10 Var2, h3D10 Var3, h3D10 Var4, h3D10 Var5, h3D10 Var6, h3D10 Var7, h3D10 Var8, h3D10 Var9, h3D10 Var10, h3D10 Var1 1, h3D10 Var12, h3D10 Var13, h3D10 Var14, Antibody A, C5H9v2, Humanized 29E.2A3, 1B9, 4H1, mAb-42, BAP058-03, BAP058-04, BAP058-06, BAP058-07, BAP058-11, BAP058-13, H6, RC5, SH1A1Q, SH1B3, SH1D1, SH1D2, SH1D12, SH1E1, SH1G9, SH1E6, SH1A2, SH1B1, H6B1L, H6A1, H6B1, H6B2, G12, RSA1, RA3, SH1E2, SH1E4, SH1B11, SH1C8, H1H9364P2, H1H9373P2, H1H8314N, PDL1.3.1 or a variant thereof.

[0396] In some embodiments, the VH and VL of the PD-L1 binding domain is selected from the following VH and VLs, respectively: SEQ ID NOs:89 and 93, SEQ ID NOs:97 and 101, SEQ ID NOs:105 and 109, SEQ ID NOs:113 and 117, SEQ ID NOs:121 and 125, SEQ ID NOs:129 and 133, SEQ ID NOs:137 and 141, SEQ ID NOs:145 and 149, SEQ ID NOs:153 and 157, SEQ ID NOs:161 and 165, SEQ ID NOs:169 and 173, SEQ ID NOs:177 and 181, SEQ ID NOs:185 and 189, SEQ ID NOs:193 and 197, SEQ ID NOs:201 and 205, SEQ ID NOs:209 and 213, SEQ ID NOs:217 and 221, SEQ ID NOs:225 and 229, SEQ ID NOs:233 and 237, SEQ ID NOs:241 and 245, SEQ ID NOs:249 and 253, SEQ ID NOs:257 and 261, SEQ ID NOs:265 and 269, SEQ ID NOs:273 and 277, SEQ ID NOs:281 and 285, SEQ ID NOs:289 and 293, SEQ ID NOs:297 and 301, SEQ ID NOs:305 and 309, SEQ ID NOs:313 and 317, SEQ ID NOs:321 and 325, SEQ ID NOs:329 and 333, SEQ ID NOs:337 and 341, SEQ ID NOs:345 and 349, SEQ ID NOs:353 and 357, SEQ ID NOs:361 and 365, SEQ ID NOs:369 and 373, SEQ ID NOs:374 and 381, SEQ ID NOs:385 and 389, SEQ ID NOs:393 and 397, SEQ ID NOs:401 and 405, SEQ ID NOs:409 and 413, SEQ ID NOs:417 and 421, SEQ ID NOs:425 and 429, SEQ ID NOs:433 and 437, SEQ ID NOs:441 and 445, SEQ ID NOs:449 and 453, SEQ ID NOs:457 and 461, SEQ ID NOs:465 and 469, SEQ ID NOs:473 and 477, SEQ ID NOs:481 and 485, SEQ ID NOs:489 and 493, SEQ ID NOs:497 and 501, SEQ ID NOs:504 and 508, SEQ ID NOs:512 and 516, SEQ ID NOs:520 and 524, SEQ ID NOs:528 and 534, SEQ ID NOs:537 and 541, SEQ ID NOs:545 and 549, SEQ ID NOs:553 and 557 or variants thereof.

[0397] In some embodiments, the 2+1 mAb-scFv format antibody is a bispecific antibody that binds PD-L1 and CD28. In some embodiments, the scFv of the second monomer is a CD28 binding domain and the VH1 of the first and second monomer and the VL1 of the common light chain each form PD-L1 binding domains. In some embodiments, the scFv of the second monomer is α PD-L1 binding domain and the VH1 of the first and second monomer and the VL1 of the common light chain each form CD28 binding domains.

[0398] Any suitable CD28 binding domain can be included in subject 2+1 mAb-scFv format antibody, including any of the CD28 binding domains provided herein. In some embodiments, the CD28 binding domain is one of the following CD28 binding domains or a variant thereof: 1A7[CD28]_H1L1, 1A7[CD28]_H1.14L1, 1A7[CD28]_L1H1.14, 1A7[CD28]_H1.1L1, 1A7[CD28]_H1L1.71, 1A7[CD28]_H1.14L1.71, 1A7[CD28]_L1.71H1.14, 1A7[CD28]_H1.1L1.71, and HuTN228[CD28]_H1L1 (FIGS. 18-23 and the Sequence Listing).

[0399] In some embodiments of the 2+1 mAb-scFv format antibody, the CD28 binding domain has a variable heavy domain (VH) selected from the group consisting of: SEQ ID NO:998, SEQ ID NO:984, SEQ ID NO:994 and SEQ ID NOs:561-629 or a variant thereof; and a variable light domain (VL) selected from the group consisting of: SEQ ID NO:1002, SEQ ID NO:984, and SEQ ID NOs:630-735 or a variant thereof. In some embodiments, the VH and VL of the CD28 binding domain are selected from the group consisting of: a VH having an amino acid sequence of SEQ ID NO:1030 and a VL having an amino acid sequence of SEQ ID NO:1034; a VH having an amino acid sequence of SEQ ID NO:1006 and a VL having an amino acid sequence of SEQ ID NO:1010; a VH having an amino acid sequence of SEQ ID NO:1014 and a VL having an amino acid sequence of SEQ ID NO:1018; and a VH having an amino acid sequence of SEQ ID NO:1022 and a VL having an amino acid sequence of SEQ ID NO:1026.

[0400] In exemplary embodiments, the CD28 binding domain includes a 1A7[CD28]_H1.14 variable heavy domain. In some embodiments, the CD28 binding domain includes a 1A7[CD28]_H1.14 variable heavy domain or variant thereof and a light variable domain of any of the CD28 binding domains provided herein. In exemplary embodiments, the CD28 binding domain is 1A7[CD28]_H1.14L1.71 or a variant thereof.

[0401] In some embodiments, the CD28 binding domain is selected from one of the following CD28 binding domains CD28.3[CD28]_H0L0, hCD28.3[CD28]_H1L1, 5.11A1[CD28]_H0L0, TGN1412_H1L1, 341VL34[CD28]_H1L1, 341VL36[CD28]_H1L1, 281VL4[CD28]_H1L1, HuTN228[CD28]_H1L1, PV1[CD28]_H0L0, m9.3[CD28]_H0L0, hu9.3[CD28]_H1L1 or a variant thereof.

[0402] In some embodiments, the VH and VL of the CD28 binding domain is selected from the following VH and VLs, respectively: SEQ ID NOs:1 and 5, SEQ ID NOs:9 and 13, SEQ ID NOs:17 and 21, SEQ ID NOs:25 and 29, SEQ ID NOs:33 and 37, SEQ ID NOs:41 and 46, SEQ ID NOs:49 and 53, SEQ ID NOs:57 and 61, SEQ ID NOs:65 and 69, SEQ ID NOs:73 and 77, and SEQ ID NOs:81 and 85. or variants thereof.

[0403] Any suitable PD-L1 binding domain can be included in the subject anti-PD-L1×anti-CD28 2+1 mAb-scFv format antibody, including any of the PD-L1 antigen binding domains provided herein (see, e.g., FIGS. 28-31 and the Sequence Listing). In exemplary embodiments, the PD-L1 binding domain has a VH with an amino acid sequence of SEQ ID NO: 1183 and a VL with an amino acid sequence of SEQ ID NO: 1187. In exemplary embodiments, the PD-L1 binding domain has a VH with an amino acid sequence of SEQ ID NO:1042 and a VL with an amino acid sequence of SEQ ID NO:1046. In exemplary embodiments, the PD-L1 binding domain has a VH with an amino acid sequence of SEQ ID NO: 1159 and a VL with an amino acid sequence of SEQ ID NO: 1163.

[0404] FIGS. 10-11 show some exemplary Fc domain sequences that are useful with the 2+1 mAb-scFv format. The “monomer 1” sequences depicted in FIG. 10 typically refer to the Fc domain of the “Fab-Fc heavy chain” and the “monomer 2” sequences refer to the Fc domain of the “Fab-Fc-scFv“heavy chain.” In addition, FIGS. 12-14 provides exemplary CH1 (optionally including hinge or half-hinge domains) that can be used in either the “Fab-Fc heavy chain” monomer or the “Fab-Fc-scFv“heavy chain.” FIG. 15 provides exemplary hinge domains that may be used in either the “Fab-Fc heavy chain” monomer or the “Fab-Fc-scFv“heavy chain.” Further, FIG. 16 provides useful CL sequences that can be used with this format.

[0405] An exemplary anti-PD-L1×anti-CD28×antibody in the 2+1 mAb-scFv format is depicted in FIG. 37.

### 6. Monospecific, Monoclonal Antibodies

[0406] As will be appreciated by those in the art, the novel Fv sequences outlined herein can also be used in both monospecific antibodies (e.g., “traditional monoclonal antibodies”) or non-heterodimeric bispecific formats. Accordingly, the present invention provides monoclonal (monospecific) antibodies comprising the 6 CDRs and/or the vh and vl sequences from the figures, generally with IgG1, IgG2, IgG3 or IgG4 constant regions, with IgG1, IgG2 and IgG4 (including IgG4 constant regions comprising a S228P amino acid substitution) finding particular use in some embodiments. That is, any sequence herein with a “H_L” designation can be linked to the constant region of a human IgG1 antibody.

[0407] In some embodiments, the monospecific antibody is an anti-CD28 monospecific antibody. In certain embodiments, the monospecific anti-CD28 antibody includes the 6 CDRs of any of the following CD28 antigen binding domains or a variant thereof: 1A7[CD28]_H1L1, 1A7[CD28]_H1.14L1, 1A7[CD28]_L1H1.14, 1A7[CD28]_H1.1L1, 1A7[CD28]_H1L1.71, 1A7[CD28]_H1.14L1.71, 1A7[CD28]_L1.71H1.14, 1A7[CD28]_H1.1L1.71, and HuTN228[CD28]_H1L1 (FIGS. 18-23 and the Sequence Listing). In some embodiments, the monospecific anti-CD28 antibody includes the variable heavy domain and variable light domain of any of the CD28 antigen binding domains or a variant thereof: 1A7[CD28]_H1L1, 1A7[CD28]_H1.14L1, 1A7[CD28]_L1H1.14, 1A7[CD28]_H1.1L1, 1A7[CD28]_H1L1.71, 1A7[CD28]_H1.14L1.71, 1A7[CD28]_L1.71H1.14, 1A7[CD28]_H1.1L1.71, and HuTN228[CD28]_H1L1 (FIGS. 18-23 and the Sequence Listing). In some embodiments of the monospecific antibody, the CD28 binding domain has a variable heavy domain (VH) selected from the group consisting of: SEQ ID NO:998, SEQ ID NO:984, SEQ ID NO:994 and SEQ ID NOs:561-629 or a variant thereof; and a variable light domain (VL) selected from the group consisting of: SEQ ID NO:1002, SEQ ID NO:984, and SEQ ID NOs:630-735 or a variant thereof. In some embodiments, the VH and VL of the CD28 binding domain are selected from the group consisting of: a VH having an amino acid sequence of SEQ ID NO:1030 and a VL having an amino acid sequence of SEQ ID NO:1034; a VH having an amino acid sequence of SEQ ID NO:1006 and a VL having an amino acid sequence of SEQ ID NO:1010; a VH having an amino acid sequence of SEQ ID NO:1014 and a VL having an amino acid sequence of SEQ ID NO:1018; and a VH having an amino acid sequence of SEQ ID NO:1022 and a VL having an amino acid sequence of SEQ ID NO:1026.

[0408] In some embodiments, the monospecific antibody is an anti-PD-L1 monospecific antibody. In certain embodiments, the monospecific anti-PD-L1 antibody includes the 6 CDRs of any one of the following PD-L1 ABDs or a variant thereof: 2G4[PDL1]_H11, 2G4[PDL1]_H1.12_L1.24, 2G4[PDL]_H1.12_L1.66, 2G4[PDL]_H1.12_L1.68, 2G4[PDL1]_H1.12_L1.14, 2G4[PDL]_H1.4_L1.23, 2G4[PDL]_H1.4_L1.24, 2G4[PDL1]_H1.9_L1, 2G4[PDL1]_H1.62_L1.63, 2G4[PDL1]_H1.6_L1.3, 2G4[PDL1]_H1.61_L1.61, 2G4[PDL]_H1.60_L1.60, 2G4[PDL]_H1.59_L1.60, 2G4[PDL1]_H1.14_L1.26, 2G4[PDL1]_H1_L1.27, 2G4[PDL1]_H1.8_L1.26, 2G4[PDL1]_H1_L1.25, 2G4[PDL1]_H1.10_L1.23, 2G4[PDL1]_H1.1_L1.1, 2G4[PDL1]_H1_L1.29 (FIGS. 28-31 and the Sequence Listing). In some embodiments, the monospecific anti-PD-L1 antibody includes the variable heavy domain and variable light domain of any one of the following PD-L1 ABDs or a variant thereof: 2G4[PDL1]_H11, 2G4[PDL1]_H1.12_L1.24, 2G4[PDL]_H1.12_L1.66, 2G4[PDL]_H1.12_L1.68, 2G4[PDL1]_H1.12_L1.14, 2G4[PDL]_H1.4_L1.23, 2G4[PDL]_H1.4_L1.24, 2G4[PDL1]_H1.9_L1, 2G4[PDL1]_H1.62_L1.63, 2G4[PDL1]_H1.6_L1.3, 2G4[PDL1]_H1.61_L1.61, 2G4[PDL1]_H1.60_L1.60, 2G4[PDL1]_H1.59_L1.60, 2G4[PDL1]_H1.14_L1.26, 2G4[PDL1]_H1_L1.27, 2G4[PDL1]_H1.8_L1.26, 2G4[PDL1]_H1_L1.25, 2G4[PDL1]_H1.10_L1.23, 2G4[PDL1]_H1.1_L1.1, 2G4[PDL1]_H1_L1.29 (FIGS. 28-31 and the Sequence Listing).

[0409] In some embodiments of the monospecific anti-PD-L1 antibody, the PD-L1 binding domain(s) has a variable heavy domain (VH) selected from the group consisting of: SEQ ID NO:1079, SEQ ID NO:1042, SEQ ID NO:1055, SEQ ID NO:1059, SEQ ID NO:1063, SEQ ID NO: 1067, SEQ ID NO: 1071, SEQ ID NO: 1075, SEQ ID NO:1083, SEQ ID NO:1087, SEQ ID NO:1091, SEQ ID NO:1095, SEQ ID NO:1099, and SEQ ID NOs:736-797 or a variant thereof; and a variable light domain (VL) selected from the group consisting of: SEQ ID NO:1111, SEQ ID NO:1046, SEQ ID NO: 1103, SEQ ID NO: 1107, SEQ ID NO: 1115, SEQ ID NO: 1119, SEQ ID NO: 1123, SEQ ID NO: 1127, SEQ ID NO:1131, SEQ ID NO: 1135, SEQ ID NO: 1139, SEQ ID NO: 1143, SEQ ID NO: 1147, SEQ ID NO:1151, SEQ ID NO: 1155, and SEQ ID NOs:798-868 or a variant thereof.

[0410] In some embodiments, the VH and VL of the PD-L1 binding domain is selected from the group consisting of: a VH having an amino acid sequence of SEQ ID NO:1183 and a VL having an amino acid sequence of SEQ ID NO:1187; a VH having an amino acid of SEQ ID NO:1042 and a VL having an amino acid sequence of SEQ ID NO:1047; a VH having an amino acid sequence of SEQ ID NO:1159 and a VL having an amino acid sequence of SEQ ID NO:1163; a VH having an amino acid sequence of SEQ ID NO:1167 and a VL having an amino acid sequence of SEQ ID NO:1171; a VH having an amino acid sequence of SEQ ID NO:1175 and a VL having an amino acid sequence of SEQ ID NO:1179; a VH having an amino acid sequence of SEQ ID NO: 1191 and a VL having an amino acid sequence of SEQ ID NO: 1195; a VH having an amino acid sequence of SEQ ID NO:1199 and a VL having an amino acid sequence of SEQ ID NO:1203; a VH having an amino acid sequence of SEQ ID NO:1207 and a VL having an amino acid sequence of SEQ ID NO:1211; a VH having an amino acid sequence of SEQ ID NO:1215 and a VL having an amino acid sequence of SEQ ID NO:1219; a VH having an amino acid sequence of SEQ ID NO:1223 and a VL having an amino acid sequence of SEQ ID NO:1227; a VH having an amino acid sequence of SEQ ID NO:1231 and a VL having an amino acid sequence of SEQ ID NO:1235; a VH having an amino acid sequence of SEQ ID NO:1239 and a VL having an amino acid sequence of SEQ ID NO:1243; a VH having an amino acid sequence of SEQ ID NO:1247 and a VL having an amino acid sequence of SEQ ID NO:1251; a VH having an amino acid sequence of SEQ ID NO:1255 and a VL having an amino acid sequence of SEQ ID NO:1259; a VH having an amino acid sequence of SEQ ID NO:1263 and a VL having an amino acid sequence of SEQ ID NO:1267; a VH having an amino acid sequence of SEQ ID NO:1271 and a VL having an amino acid sequence of SEQ ID NO:1275; a VH having an amino acid sequence of SEQ ID NO:1279 and a VL having an amino acid sequence of SEQ ID NO:1283; a VH having an amino acid sequence of SEQ ID NO:1287 and a VL having an amino acid sequence of SEQ ID NO:1291; a VH having an amino acid sequence of SEQ ID NO:1295 and a VL having an amino acid sequence of SEQ ID NO:1299; and a VH having an amino acid sequence of SEQ ID NO:1303 and a VL having an amino acid sequence of SEQ ID NO:1307.

### VI. Nucleic Acids

[0411] In another aspect, provided herein are nucleic acid compositions encoding the antigen binding domains and anti-PD-L1 and anti-CD28 antibodies provided herein (e.g., PD-L1×αCD28 bispecific antibodies).

[0412] As will be appreciated by those in the art, the nucleic acid compositions will depend on the format and scaffold of the heterodimeric protein. Thus, for example, when the format requires three amino acid sequences, such as for the 1+1 Fab-scFv-Fc, 2+1 Fab₂-scFv-Fc, and 2+1 mAb-scFv formats, three polynucleotides can be incorporated into one or more expression vectors for expression. In exemplary embodiments, each polynucleotide is incorporated into a different expression vector.

[0413] As is known in the art, the nucleic acids encoding the components of the binding domains and antibodies disclosed herein can be incorporated into expression vectors as is known in the art, and depending on the host cells used to produce the heterodimeric antibodies of the invention. Generally the nucleic acids are operably linked to any number of regulatory elements (promoters, origin of replication, selectable markers, ribosomal binding sites, inducers, etc.). The expression vectors can be extra-chromosomal or integrating vectors.

[0414] The polynucleotides and/or expression vectors of the invention are then transformed into any number of different types of host cells as is well known in the art, including mammalian, bacterial, yeast, insect and/or fungal cells, with mammalian cells (e.g., CHO cells), finding use in many embodiments.

[0415] In some embodiments, polynucleotides encoding each monomer are each contained within a single expression vector, generally under different or the same promoter controls. In embodiments of particular use in the present invention, each of these polynucleotides are contained on different expression vectors. As shown herein and in U.S. 62/025,931, hereby incorporated by reference, different vector ratios can be used to drive heterodimer formation. That is, surprisingly, while the proteins comprise first monomer:second monomer:light chains (in the case of many of the embodiments herein that have three polypeptides comprising the heterodimeric antibody) in a 1:1:2 ratio, these are not the ratios that give the best results.

[0416] The antibodies and ABDs provided herein are made by culturing host cells comprising the expression vector(s) as is well known in the art. Once produced, traditional antibody purification steps are done, including an ion exchange chromatography step. As discussed herein, having the pIs of the two monomers differ by at least 0.5 can allow separation by ion exchange chromatography or isoelectric focusing, or other methods sensitive to isoelectric point. That is, the inclusion of pI substitutions that alter the isoelectric point (pI) of each monomer so that such that each monomer has a different pI and the heterodimer also has a distinct pI, thus facilitating isoelectric purification of the “1+1 Fab-scFv-Fc” heterodimer (e.g., anionic exchange columns, cationic exchange columns). These substitutions also aid in the determination and monitoring of any contaminating dual scFv-Fc and mAb homodimers post-purification (e.g., IEF gels, cIEF, and analytical IEX columns).

### VII. Biological and Biochemical Functionality of the Anti-PD-L1×Anti-CD28 Antibodies

[0417] Generally the bispecific anti-PD-L1×anti-CD28 antibodies described herein are administered to patients with cancer (e.g., α PD-L1 associated cancer or cancer that has been shown to benefit from anti-PD-1 or anti-PD-L1 treatment), and efficacy is assessed, in a number of ways as described herein. Thus, while standard assays of efficacy can be run, such as cancer load, size of tumor, evaluation of presence or extent of metastasis, etc., immuno-oncology treatments can be assessed on the basis of immune status evaluations as well. This can be done in a number of ways, including both in vitro and in vivo assays.

### A. Antibody Compositions for In Vivo Administration

[0418] Formulations of the antibodies used in accordance with the present invention are prepared for storage by mixing an antibody having the desired degree of purity with optional pharmaceutically acceptable carriers, excipients or stabilizers (Remington's Pharmaceutical Sciences 16th edition, Osol, A. Ed. [1980]), in the form of lyophilized formulations or aqueous solutions.

### VIII. Treatments

[0419] Once made, the compositions of the invention find use in a number of oncology applications, by treating cancer, generally by enhancing immune responses (e.g., T cell activation and proliferation), particularly when used with anti-cancer therapies such as anti-PD1 and anti-tumor bispecific antibodies. In some embodiments, the antibodies provided herein enhance immune responses (e.g., T cell activation and proliferation) by providing agonistic co-stimulation of T cells in the microenvironment of tumors expressing PD-L1.

### A. Anti-CD28×Anti-TAA/Anti-TAA Bispecific Antibody

[0420] In some embodiments, the anti-PD-L1×anti-CD28 bispecific antibodies provided herein are administered with an anti-tumor bispecific antibody. In classic T cell/APC interaction, there is a first signal provided by TCR reactivity with peptide-MHC (Signal 1) and a second signal provided by CD28 crosslinking by CD80/CD86 being expressed on APCs (Signal 2) which together fully activate T cells (see FIG. 32A). In contrast, only the first signal is provided in treatment with CD3 bispecific antibodies that target a TAA (i.e., anti-CD3×anti-TAA bispecific antibodies).

[0421] Without being bound by any particular theory of operation, it is believed that the anti-PD-L1×anti-CD28 bispecific antibodies provided herein can enhance the anti-tumor response of an anti-CD3×anti-TAA bispecific antibody by providing CD28 costimulation and blockage of inhibitory PD-L1:PD-1 pathway interactions (see FIGS. 32B and 34 and Example 4B). Thus, in one aspect, provided herein are methods of methods of treating a cancer in a patient by administering the patient an anti-CD3×anti-TAA bispecific antibody and an anti-CD28×anti-PD-L1 bispecific antibody provided herein. In some embodiments, the administration of the anti-CD3×anti-TAA bispecific antibody and anti-CD28×anti-PD-L1 bispecific antibody enhances an immune response against the tumor in the patient. CD3 binding domains that can be included in the anti-CD3×anti-TAA bispecific antibodies are included in FIG. 44.

### B. Administrative Modalities

[0422] The antibodies provided herein administered to a subject, in accord with known methods, such as intravenous administration as a bolus or by continuous infusion over a period of time.

### C. Treatment Modalities

[0423] In the methods of the invention, therapy is used to provide a positive therapeutic response with respect to a disease or condition.

[0424] By “positive therapeutic response” is intended an improvement in the disease or condition, and/or an improvement in the symptoms associated with the disease or condition. For example, a positive therapeutic response would refer to one or more of the following improvements in the disease: (1) a reduction in the number of neoplastic cells; (2) an increase in neoplastic cell death; (3) inhibition of neoplastic cell survival; (5) inhibition (i.e., slowing to some extent, preferably halting) of tumor growth; (6) an increased patient survival rate; and (7) some relief from one or more symptoms associated with the disease or condition.

[0425] Positive therapeutic responses in any given disease or condition can be determined by standardized response criteria specific to that disease or condition. Tumor response can be assessed for changes in tumor morphology (i.e., overall tumor burden, tumor size, and the like) using screening techniques such as magnetic resonance imaging (MRI) scan, x-radiographic imaging, computed tomographic (CT) scan, bone scan imaging, endoscopy, and tumor biopsy sampling including bone marrow aspiration (BMA) and counting of tumor cells in the circulation.

[0426] In addition to these positive therapeutic responses, the subject undergoing therapy may experience the beneficial effect of an improvement in the symptoms associated with the disease.

[0427] Treatment according to the present invention includes a “therapeutically effective amount” of the medicaments used. A “therapeutically effective amount” refers to an amount effective, at dosages and for periods of time necessary, to achieve a desired therapeutic result.

[0428] A therapeutically effective amount may vary according to factors such as the disease state, age, sex, and weight of the individual, and the ability of the medicaments to elicit a desired response in the individual. A therapeutically effective amount is also one in which any toxic or detrimental effects of the antibody or antibody portion are outweighed by the therapeutically beneficial effects.

[0429] A “therapeutically effective amount” for tumor therapy may also be measured by its ability to stabilize the progression of disease. The ability of a compound to inhibit cancer may be evaluated in an animal model system predictive of efficacy in human tumors.

[0430] Alternatively, this property of a composition may be evaluated by examining the ability of the compound to inhibit cell growth or to induce apoptosis by in vitro assays known to the skilled practitioner. A therapeutically effective amount of a therapeutic compound may decrease tumor size, or otherwise ameliorate symptoms in a subject. One of ordinary skill in the art would be able to determine such amounts based on such factors as the subject's size, the severity of the subject's symptoms, and the particular composition or route of administration selected.

[0431] Dosage regimens are adjusted to provide the optimum desired response (e.g., a therapeutic response). For example, a single bolus may be administered, several divided doses may be administered over time or the dose may be proportionally reduced or increased as indicated by the exigencies of the therapeutic situation. Parenteral compositions may be formulated in dosage unit form for ease of administration and uniformity of dosage. Dosage unit form as used herein refers to physically discrete units suited as unitary dosages for the subjects to be treated; each unit contains a predetermined quantity of active compound calculated to produce the desired therapeutic effect in association with the required pharmaceutical carrier.

[0432] The specification for the dosage unit forms of the present invention are dictated by and directly dependent on (a) the unique characteristics of the active compound and the particular therapeutic effect to be achieved, and (b) the limitations inherent in the art of compounding such an active compound for the treatment of sensitivity in individuals.

[0433] The efficient dosages and the dosage regimens for the bispecific antibodies used in the present invention depend on the disease or condition to be treated and may be determined by the persons skilled in the art.

[0434] All cited references are herein expressly incorporated by reference in their entirety.

[0435] Whereas particular embodiments of the invention have been described above for purposes of illustration, it will be appreciated by those skilled in the art that numerous variations of the details may be made without departing from the invention as described in the appended claims.

### EXAMPLES

[0436] Examples are provided below to illustrate the present invention. These examples are not meant to constrain the present invention to any particular application or theory of operation. For all constant region positions discussed in the present invention, numbering is according to the EU index as in Kabat (Kabat et al., 1991, Sequences of Proteins of Immunological Interest, 5th Ed., United States Public Health Service, National Institutes of Health, Bethesda, entirely incorporated by reference). Those skilled in the art of antibodies will appreciate that this convention consists of nonsequential numbering in specific regions of an immunoglobulin sequence, enabling a normalized reference to conserved positions in immunoglobulin families. Accordingly, the positions of any given immunoglobulin as defined by the EU index will not necessarily correspond to its sequential sequence.

[0437] General and specific scientific techniques are outlined in US Publications 2015/0307629, 2014/0288275 and WO2014/145806, all of which are expressly incorporated by reference in their entirety and particularly for the techniques outlined therein.

### BACKGROUND

[0438] While checkpoint blockade immunotherapies have proven to be effective, many patients nonetheless fail to achieve a response. Engagement of T cell costimulatory receptors on TILs (e.g., CD80/CD86) with agonistic antibodies (e.g., anti-CD28 antibodies) could provide an additional positive signal capable of overcoming negative signals of immune checkpoints and may be a useful therapeutic modality to stack with checkpoint blockade.

[0439] Anti-PD-L1×anti-CD28 bispecific antibodies provided herein provide a costimulatory signal for T-cell activation against tumor cells while advantageously also block inhibitory PD-L1:PD1 pathway interactions.

### Example 1: CD28 Binding Domains

[0440] Sequences for human, mouse, and cynomolgus PD-L1 are depicted in FIG. 1 and are useful for the development of cross-reactive CD28 antigen binding domains for ease of clinical development.

### 1A: Novel CD28 Binding Domains

[0441] An approach considered to avoid the superagonism associated with TGN1412 was to generate novel CD28 binding domains having lower affinity binding to CD28 and/or binding to a different CD28 epitope than TGN1412. In one campaign to generate such novel CD28 binding domains, in-house de novo phage libraries were panned against CD28. In another campaign, rat hybridomas were used to generate additional CD28 binding domains.

### 1A(a): Phage-Derived Clone 1A7

[0442] It should be noted that this phage library utilized a human germline VL with diversity introduced into the LCDR3. The amino acid sequences for exemplary phage-derived clone 1A7 are depicted in FIG. 18.

[0443] The phage-derived clones were formatted as bivalent mAbs to investigate their binding characteristics. Plasmids containing the variable heavy and variable light domains of select clones were constructed by Gibson assembly and subcloned into a pTT5 expression vector containing the coding sequence for the IgG1 constant regions (with E233P/L234V/L235A/G236del/S67K ablation variants). DNA was transfected in HEK293E for expression and resulting bivalent mAbs were purified from the supernatant using protein A chromatography.

[0444] Affinity of the phage-derived bivalent mAbs for CD28 was screened using Octet, a BioLayer Interferometry (BLI)-based method. Experimental steps for Octet generally include the following: Immobilization (capture of ligand to a biosensor); Association (dipping of ligand-coated biosensors into wells containing the analyte); and Dissociation (returning of biosensors to well containing buffer). The resulting apparent dissociation constant (K_{Dapp}) are depicted in FIG. 24 for XENP28428 (based on clone 1A7) and additional phage-derived comparators.

[0445] Binding of the phage-derived bivalent mAbs to cell-surface CD28 was investigated. Human PBMCs were incubated with indicated concentrations of XENP28428 or comparator phage-derived mAbs for 1 hour at 4° C. Cells were then then stained with Alexa Fluor® 647 AffiniPure F(ab′)₂ Fragment Goat Anti-Human IgG, Fcγ fragment specific secondary antibody (Jackson ImmunoResearch, West Grove, Penn.) for 1 hour at 4° C. and analyzed by flow cytometry. The data (FIG. 25) show that the phage-derived mAbs were able to bind human PBMCs, although with much weaker maximum binding than prior art anti-CD28 mAb HuTN228 (XENP27181, sequences for which are depicted in FIG. 23).

### 1A(b): 1A7 is not Superagonistic

[0446] Potential superagonism of XENP34339 was assessed by air-drying per the Stebbings protocol (Stebbings R. et al. 2007). Air-drying of test articles was achieved by drying in a SpeedVac™ for 2 hours at room temperature. Human PBMCs were treated for 24 hours with 10 μg of air-dried XENP28428 (parental αCD28 mAb 1A7), and activity was compared to the superagonist TGN1412 (XENP29154; sequences for which are depicted in FIG. 45) or PBS control. Air-dried TGN1412 promoted IFNγ secretion from unstimulated human PBMC. In comparison, IFNγ level in PBMCs treated with air-dried XENP28428 remained similar to the negative control of PBS (data shown in FIG. 46).

### 1A(c): Engineering 1A7 Affinity Variants

[0447] Towards optimization of αPDL1×αCD28 bsAbs as described in Example 5, numerous 1A7 affinity variants were developed by engineering VH variants (illustrative sequences as depicted in FIG. 19 and additional sequences depicted as SEQ ID NOs:994-1001), VL variants (illustrative sequences as depicted in FIG. 20 and additional sequences depicted as SEQ ID NOs:1002-1005), and combinations thereof (illustrative sequences for which are depicted in FIG. 21). Affinity of illustrative variants, in the context of αPDL1×αCD28 bsAbs having sequences as depicted in FIG. 22, was determined using Octet as generally described above, sensorgrams and binding affinity as depicted in FIG. 47.

### 1B: Additional CD28 Binding Domains

[0448] Sequences for additional CD28 binding domains which may find use in the αPDL1×αCD28 bsAbs of the invention are depicted as SEQ ID NOs:1006-1021.

### Example 2: PDL1 Binding Domains

[0449] Sequences for human, mouse, and cynomolgus PD-L1 are depicted in FIG. 2 and are useful for the development of cross-reactive PDL1 antigen binding domains for ease of clinical development.

### 2A: Novel PDL1 Binding Domains

[0450] Numerous novel PDL1 binding domains were generated by hybridoma technology through IMMUNOPRECISE®. In addition to targeting the αPDL1×αCD28 to PDL1+ cells, it was contemplated that additional blockade of PDL1:PD1 interaction would be useful. Further, for ease of clinical development, it is useful to investigate various parameters of the bispecific antibodies of the invention such as pharmacodynamics, pharmacokinetics, and toxicity in cynomolgus monkeys.

[0451] Accordingly, the novel hydridoma-derived PDL1 binding domains were screened for affinity to human and cynomolgus PDL1 as well as for their ability to block PDL1:PD1 interaction using Octet as generally described above. In particular, anti-mouse IgG biosensor was dipped into 1:3 dilution of hybridoma culture supernatant and then dipped into multiple concentrations of human or cynomolgus PDL1 antigen (to determine binding affinity) or into mixtures of PD1:PDL1 antigen (blocking antibodies will not bind the PD1:PDL1 complex). Out of 106 hybridoma-derived PDL1 binding domains investigated, only 70 were cross-reactive for human and cynomolgus PDL1. Out of those 70, only 33 were considered as complete blockers of PD1:PDL1 interaction. The remaining PDL1 binders were further characterized for ability to bind PDL1 on cells and block PDL1:PD1 interaction on cells and affinity. Finally, suitable PDL1 binding domains were humanized using string content optimization (see, e.g., U.S. Pat. No. 7,657,380, issued Feb. 2, 2010). The amino acid sequences for exemplary humanized hybridoma-derived clone 2G4 (selected based on the above filtering) are depicted in FIG. 28.

### 2A(a): Comparison to Other PDL1 Binding Domains

[0452] As described above, numerous other PDL1 binding domains were identified. In a first experiment comparing anti-PDL1 clone 2G4 with the other PDL1 binding domains. anti-PDL1 mAbs were incubated with indicated concentration of huPDL1-mFc fusions. The mixture was then combined with PD-1-expressing HEK293T cells. Cells were stained with anti-mouse Fc and binding was assessed by flow cytometry, data for which are depicted in FIG. 41. The data show that anti-PDL1 clone 2G4 blocks PD1:PDL1 interaction.

[0453] In a second experiment, CD3+ T cells from 11 unique donors were treated with a constant dose of the indicated test articles in the presence of 10,000 dendritic cells. Cytokine secretion was measured using MSD assay (Meso Scale Discovery, Rockville, Md.). The data depicted in FIG. 42 show that anti-PDL1 2G4 induced greater IL-2 and IFNγ release in comparison to the partial-blocking and the non-blocking anti-PDL1 clones.

### 2A(b): Engineering 2G4 Affinity Variants

[0454] Towards optimization of αPDL1×αCD28 bsAbs as described in Example 5, numerous 2G4 affinity variants were developed by engineering VH variants (illustrative sequences as depicted in FIG. 29 and additional sequences depicted as SEQ ID NOs:1055-1102), VL variants (illustrative sequences as depicted in FIG. 30 and additional sequences depicted as SEQ ID NOs:1103-1158), and combinations thereof (illustrative sequences as depicted in FIG. 31). Affinity of illustrative variants, in the context of αPDL1×αCD28 bsAbs having sequences as depicted in FIG. 28, was determined using Biacore. Experimental steps for Biacore generally included the following: Immobilization (capture of ligand onto a sensor chip); Association (flowing of various concentrations of analyte over sensor chip); and Dissociation (flowing buffer over the sensor chips) in order to determine the affinity of the test articles. A reference flow with buffer alone was also included in the method for background correction during data processing. Binding affinities and kinetic rate constants were obtained by analyzing the processed data using a 1:1 binding model. Binding affinity for human and cynomolgus PDL1 determined as such are depicted in FIG. 50.

### 2B: Additional PDL1 Binding Domains

[0455] Sequences for additional PDL1 binding domains which may find use in the αPDL1×αCD28 bsAbs of the invention are depicted as SEQ ID NOs: 1159-1310.

### Example 3: Engineering αPDL1×αCD28 bsAbs

[0456] As described in Example 4, in classic T cell/APC interaction, there is a first signal provided by TCR reactivity with peptide-MHC (Signal 1) and a second signal provided by CD28 crosslinking by CD80/CD86 being expressed on APCs (Signal 2) which together fully activate T cells (see FIG. 32). Further, it may be useful to stack the CD28 signal with checkpoint blockade to mitigate any checkpoint mediated repression of the added CD28 signal (FIG. 33). αPDL1×αCD28 may provide the Signal 2 while advantageously further enabling blockade of PDL1:PD1 interaction (FIG. 34).

[0457] Accordingly, αPDL1×αCD28 bsAbs were engineered and produced. A number of formats were conceived, illustrative formats for which are outlined below and in FIGS. 26-27. It should be noted that in each case, the CD28 bispecific antibodies are monovalent for CD28 and incorporate Fc variants engineered to ablate FcγR binding (such as those depicted in FIG. 5) to avoid potential superagonism.

### 3A: 1+1 Fab-scFv-Fc Format

[0458] One format utilizing Fab domains and scFv is the 1+1 Fab-scFv-Fc format (depicted schematically in FIG. 27A) which comprises a first monomer comprising a single-chain Fv (“scFv”) with a first antigen binding specificity covalently attached to a first heterodimeric Fc domain, a second monomer comprising a heavy chain variable region (VH) covalently attached to a complementary second heterodimeric Fc domain, and a light chain (LC) transfected separately so that a Fab domain having a second antigen binding specificity is formed with the variable heavy domain. Sequences for illustrative αPDL1×αCD28 bsAbs (based on binding domains as described in Examples 1 and 2) in the 1+1 Fab-scFv-Fc format are depicted in FIG. 35.

### 3B: 2+1 Fab2-scFv-Fc Format

[0459] Another such format is the 2+1 Fab2-scFv-Fc format (depicted schematically in FIG. 27B) which comprises a first monomer comprising a VH domain covalently attached to an scFv (having a first antigen binding specificity) covalently attached to a first heterodimeric Fc domain, a second monomer comprising a VH domain covalently attached to a complementary second heterodimeric Fc domain, and a LC transfected separately so that Fab domains having a second antigen binding specificity are formed with the VH domains. Sequences for illustrative αPDL1×αCD28 bsAbs (based on binding domains as described in Examples 1 and 2) in the 2+1 Fab2-scFv-Fc format are depicted in FIG. 36.

3C: 2+1 mAb-scFv Format

[0460] An additional format utilizing Fab domains and scFv is the 2+1 mAb-scFv format (depicted schematically in FIG. 27E) which comprises a first monomer comprising a VH domain covalently attached to a first heterodimeric Fc domain covalently attached to an scFv (having a first antigen binding specificity), a second monomer comprising a VH domain covalently attached to a complementary second heterodimeric Fc domain, and a LC transfected separately so that Fab domains having a second antigen specificity are formed with the VH domains. Sequences for illustrative αPDL1×αCD28 bsAbs (based on binding domains as described here) in the 2+1 mAb-scFv format are depicted in FIG. 37.

### Example 4: Characterizing Prototype αPDL1×αCD28 bsAbs

4A: αPDL1×αCD28 bsAbs Induce Expansion of T Cells

[0461] MDA-MB-231 (PDL1+) cancer cells were ectopically loaded with pp65-derived NLV-peptide for 24 hours. The following day, T cells from a CMV+donor were added along with a monovalent αPDL1 antibody XENP24118 (based on avelumab; sequences depicted in FIG. 38) or αPDL1×αCD28 XENP34963. Expansion of CMV+ T cells was measured with an NLV-specific tetramer. The data as depicted in FIG. 39 show that the αPDL1×αCD28 bsAb XENP36233 significantly enhanced T cell expansion in comparison to PDL1 blockade alone.

4B: αPDL1×αCD28 bsAbs Block PD-1:PD-L1 Interaction During T-Cell:Cancer Cell Interactions

[0462] Jurkat-PD1 cells were treated with a dose titration of the indicated test articles (i.e. αPDL1×αCD28 bsAbs containing αPDL1 clone 2G4, a partial-blocking αPDL1 arm, or a non-blocking αPDL1 arm) in the presence of CHO-PDL1-CD80-αCD3 and CHO-PDL1-αCD3 cells. 6 hours post Jurkat-PD1 seeding, luciferase activity was measured as an indicator of PD-1 blockade. The data as depicted in FIG. 51 show that XENP36233 having blocking αPDL1 clone 2G4 induced strong luciferase activity in comparison to αPDL1×αCD28 bsAbs having partial blocking or non-blocking αPDL1 arms.

4C: αPDL1×αCD28 bsAbs are More Active on Cells Having Higher PDL1 Antigen Density

[0463] PDL1^{null} MC38 cells were transfected to express low or medium levels of PDL1 antigen (respectively 40K and 59K antigen density). Parental, PDL1^{low}, and PDL1^{med} MC38 clones were treated with a dose titration of XENP36233. Secondary A647-conjugated anti-human Fc antibody was used to detect the bsAbs by flow cytometry, data for which are depicted in FIG. 52. The data show that binding correlates to PDL1 antigen density.

[0464] Next, PDL1^{null} HEK293T cells were transfected to express medium or high levels of PDL1 antigen. 10,000 CD3+ T cells were treated with a dose titration of XENP36233 and 1 μg/mL αB7H3×αCD3 in the presence of 10,000 PDL1-HEK293T density series. 1 day post T cell seeding, IL-2 secretion was measured using MSD assay. The data as depicted in FIG. 53 show that αPDL1×αCD28 bsAbs are more active on cells having higher PDL1 antigen density. 4D: αPDL1×αCD28 bsAbs enhance activity of CD3 bispecific antibodies

[0465] In a first experiment, induction of cytokine (IL-2 and IFNγ) release and CD3+ T cell expansion by αPDL1×αCD28 bsAbs in combination with CD3 bispecific antibodies was assessed using Incucyte® Live-Cell Analysis system (Essen BioScience, Ann Arbor, MI). MDA-MB-231 cancer cells and T cells were mixed with 1 μg/ml of an illustrative αB7H3×αCD3 bispecific and indicated concentrations of αPDL1 mAb XENP24118 or αPDL1×αCD28 bsAb XENP34963. Cancer cell growth was assayed over time with Incucyte, while cytokine secretion was measured using MSD assay (Meso Scale Discovery, Rockville, Md.) and T cell expansion was measured using flow cytometry. The data as depicted in FIG. 40 show that αPDL1×αCD28 bsAb synergizes with CD3 bispecific antibodies to induce T-cell activation.

[0466] In another experiment, cell kill at a 1:1 effector:target ratio was assessed using xCELLigence Real Time Cell Analysis instrument (ACEA Biosciences, San Diego, CA). 1,250 LNCaP cancer cells were first seeded. After 48 hours, freshly enriched CD3+ T cells at an effector:target of 1:1 were added along with antibodies (αPSMA×αCD3 XENP32220 alone or XENP32220 in combination with XENP36233; sequences for XENP32220 are depicted in FIG. 41) at a constant dose. Cell kill was recorded for 10 days post T cell seeding. In this experiment, the data as depicted in FIG. 42 show that XENP32220 alone was able to enhance cell kill in comparison to incubation of cancer and T cells alone; however, addition of PDL1×CD28 overcomes cancer cell resistance to the CD3 bispecific and further enhances cell kill.

4E: αPDL1×αCD28 bsAbs do not Synergize with CD3 bsAbs on PDL1 Negative Cell Lines

[0467] CD3+ T cells were incubated with 22Rv1 (PDL1^{null}) at 10:1 and 1:1 E:T ratios with αB7H3×αCD3 alone or αB7H3×αCD3 in combination with XENP36233. Cell kill was recorded using xCELLigence for 7 days post T cell seeding. The data as depicted in FIG. 54 show that αPDL1×αCD28 bsAb XENP36233 did not synergize with the αB7H3×αCD3 to enhance cell kill of the PDL1 negative 22Rv1 cell line.

### 4F: αPDL1×αCD28 Enhances Anti-Tumor Activity In Vivo

[0468] MC38 cancer cells stably expressing human PDL1 antigen were subcutaneously inoculated into human CD28 knock-in mice. When tumors were palpable (Day 0), mice were intraperitoneally treated weekly with either 5 mg/kg bivalent αPDL1 antibody based on avelumab (XENP24118), 6 mg/kg αPDL1×αCD28 XENP34961 (2+1 mAb-scFv format), or 8.3 mg/kg αPDL1×αCD28 XENP34963 (1+1 Fab-scFv-Fc format). Mice were additionally dosed on Days 3, 7, 10, 14, and 17. Tumor volumes were monitored by caliper measurements, data for which are shown (days post 1^{st} dose) in FIG. 43. The data show that although PDL1 blockade inhibited tumor growth, the αPDL1×αCD28 bsAbs as a single-agents significantly enhanced anti-tumor activity.

4G: αPDL1×αCD28 was Well Tolerated in Cynomolgus Monkeys and Exhibited Favorable pharmacokinetics

[0469] Cynomolgus monkeys were dosed with XENP36764 (sequences for which are depicted in FIG. 35; XENP36233 further engineered with M428L/N434S for enhanced half-life). The data as depicted in FIG. 55 show that the αPDL1×αCD28 exhibited favorable pharmacokinetics. Additionally, the bsAb was well tolerated (data not shown).

### Example 5: Optimizing αPDL1×αCD28 bsAbs

### 5A: Mechanism-Based PK/PD Modeling Suggests Avenues for Tuning CD28 and PDL1 Binding Affinities

[0470] Surface expression of PD-L1 is low on tumors may limit synapse engagement and presents the problem of how to obtain optimal cross-linking of CD28 with a bispecific. With this background, computer modeling was used to assist engineering of optimized αPDL1×αCD28 bsAbs by finding the best balance of CD28 and PDL1 affinities to achieve low antigen density targeting. A mechanism-based model was developed using experimental data (from scientific literature and in-house generated) and the following assumptions (schematically depicted in FIG. 56): three well-mixed compartments (central, peripheral, and tumor); all the compartments contain both T cells and PDL1 expressing cells; free drug transport between all compartments; non-specific clearance of the drug occurs in all compartments with the same order rate; soluble target for CD28 and PDL1 are low affinity and therefore not included; drug-bound receptor has the same internalization rate as the free receptor; cross-linking CD28:drug_PD-L1 trimer is assumed to internalize with either target; and cross-linking CD28:drug_PD-L1 trimer is assumed to internalize at the rate of faster receptor. As depicted in FIG. 57, the model predicted intratumoral T cell costimulatory activity and consistent PDL1 blockade; linear PK at dose levels consistent with typical checkpoint inhibitor regimens; trimer formation in the tumor indicating costimulation; and consistent blockade of PDL1.

[0471] Notably in view of low surface expression of PDL1 on tumors, the simulations suggested that CD28 affinity must be enhanced (from 560 nM to 58 nM) and that PDL1 affinity must be enhanced (from 2.4 nM to 0.1 nM).

### 5B: Tuning CD28 Binding Affinity

[0472] Based on the above suggestion, αCD28 clone 1A7 affinity variants were engineered as described in Example 1A(c) and paired with WT αPDL1 clone 2G4.

### 5B(a): Increasing CD28 Affinity Leads to More Potent and Efficacious IL-2 Secretion

[0473] In a first experiment investigating the effect of enhanced CD28 binding affinity, MDA-MB-231 or DU145 cancer were incubated with CD3+ T cells at an E:T ratio of 10:1, 1 μg/mL αB7H3×αCD3, and titrated doses of the indicated αPDL1×αCD28 test articles having the following range of CD28 binding affinities: 37 nM (1A7_L1.71_H1.14 in XENP37561); 36 nM (1A7_H1.14_L1.71 in XENP37261); 96 nM (1A7_H1.1_L1.71 in XENP37560); 180 nM (1A7_H1_L1.71 in XENP37559); 286 nM (1A7_L1_H1.14 in XENP37412); and 240 nM (1A7_H1.14_L1 in XENP36233). IL-2 secretion was assessed after 24 hours, data for which are depicted in FIG. 58. The data show that increasing CD28 affinity leads to more potent and efficacious IL-2 secretion. Notably in this set, 180 nM binding affinity for CD28 is the minimum for maximum activity (with XENP37412 and XENP36233 respectively having 286 nM and 240 nM binding affinities for CD28 demonstrating not only less potent but also less efficacious activity).

### 5B(b): Increasing CD28 Affinity Increases Cytotoxicity of PDL1^{low} Cancer Cells at an E:T of 1:1

[0474] In a second experiment investigating the effect of enhanced CD28 binding affinity, LnCAP cells (PDL1^{low}) were incubated with CD3+ T cells at a low E:T ratio of 1:1 with 1 μg/ml αB7H3×αCD3 bsAb alone or in combination with 1 μg/ml of αPDL1×αCD28 bsAbs having different CD28 binding affinities (same set as in Example 5B(a)). Cytotoxicity was recorded using xCELLigence for 6 days post T cell seeding, data for which are depicted in FIG. 59. The data show that increasing CD28 affinity increases cytotoxicity of low PDL1 expressing cancer cells at a low E:T ratio of 1:1.

### 5B(c): Increasing CD28 Affinity Increases Cytotoxicity of PDL1^{med} Cancer Cells at an E:T of 0.1:1

[0475] In a second experiment investigating the effect of enhanced CD28 binding affinity, DU145 cells (PDL1^{med}) were incubated with CD3+ T cells at a low E:T ratio of 0.1:1 with 1 μg/ml αB7H3×αCD3 bsAb alone or in combination with 1 μg/ml of αPDL1×αCD28 bsAbs having different CD28 binding affinities (same set as in Example 5B(a)). Cytotoxicity was recorded using xCELLigence for 6 days post T cell seeding, data for which are depicted in FIG. 60. The data show that increasing CD28 affinity increases cytotoxicity of medium PDL1 expressing cancer cells at a very low E:T ratio of 0.1:1.

5B(d): αPDL1×αCD28 bsAbs Tuned for Enhanced CD28 Binding Affinity are Active In Vivo

[0476] αPDL1×αCD28 bsAb XENP37261 having affinity-enhanced CD28 arm was investigated in an in vivo anti-tumor model similar to Example 4F. MC38 cancer cells stably expressing human PDL1 antigen were subcutaneously inoculated into human CD28 knock-in mice. When tumors were palpable (Day 0), mice were intraperitoneally treated weekly with either 6.6 mg/kg monovalent αPDL1 antibody based on avelumab (XENP36627) or 8.3 mg/kg αPDL1×αCD28 XENP37261. Tumor volumes were monitored by caliper measurements, data for which are shown (days post 1^{st} dose) in FIG. 61. The data show that although PDL1 blockade inhibited tumor growth, the αPDL1×αCD28 bsAb XENP37261 as a single-agent significantly enhanced anti-tumor activity.

### 5C: Tuning PDL1 Binding Affinity

[0477] Next, αPDL1 clone 2G4 affinity variants were engineered as described in Example 1A(c) and paired with αCD28 clone 1A7_H1_L1.71 (180 nM CD28 arm; lower CD28 activity allows for assessment of PDL1 blockade).

### 5C(a): Increasing PDL1 Affinity Promotes Cytokine Secretion

[0478] In a first experiment, DU145-NLR cells were incubated with CD3+ T cells at a E:T ratio of 1:1 and treated with 1 μg/mL αB7H3×αCD3 and dose response of the indicated αPDL1×αCD28 bsAbs having different PDL1 binding affinities. 1 day post T cell seeding, IL-2 secretion was assessed using MSD assay, data for which are depicted in FIG. 62. The data show that increased PDL1 affinity promotes IL-2 secretion.

[0479] In a second experiment, data for which are depicted in FIG. 63, XENP38514 having 0.17 nM PDL1 arm enhances T cell/APC interaction in DC: T cell mixed lymphocyte reaction as indicated by IL-2 and IFNγ release.

### 5C(b): Increasing PDL1 Affinity Promotes PD1:PDL1 Blockade

[0480] In another experiment, indicated concentrations of the αPDL1×αCD28 bsAbs were incubated in the presence of huPD-L1-mFc fusion for 30 minutes at room temperature. The mixture was then combined with PD-1-expressing HEK293T cells and incubated for 1 hour at 4° C. Cells were stained with anti-mouse Fc and binding was assessed by flow cytometry, data for which are depicted in FIG. 64. The data show the αPDL1×αCD28 bsAbs can block interaction between PD1 and PDL1.

### 5D: Tuning Both CD28 and PDL1 Binding Affinities

[0481] As the mechanism-based modeling suggested that affinity-enhanced CD28 binding domains should be paired with affinity-enhanced PDL1 binding domains, bsAbs having affinity-enhanced αCD28 clone 1A7 variants were paired with affinity-enhanced αPDL1 clone 2G4.

[0482] In a first experiment, PDL1 binding domains having 0.6 nM, 1 nM, and 2.6 nM binding affinities were paired with CD28 binding domains having 37 nM, 96 nM, 180 nM, and 230 nM binding affinities and investigated in an SEB-stimulated PBMC assay. PBMCs were stimulated with 110 ng/mL SEB for 2 days. 200,000 PBMCs were then seeded in the presence of 10 ng/mL SEB and αPDL1×αCD28 bsAbs at the indicated doses. IL-2 secretion was assayed after 24 hours, data for which are depicted in FIG. 65. The data suggest that high affinity PD-L1 arms such as 0.6 nM arm is optimally paired with 37 nM CD28 arm; nonetheless, high affinity PD-L1 binding overcomes the requirement for increased CD28 affinity as it also enables good activity in combination with low affinity CD28 as in XENP39365 and XENP39368.

### Example 6: Further Optimization of the αPDL1×αCD28 bsAbs

[0483] Additional optimization of other characteristics such as stability and expression are also important from a developability perspective. Although pairing high affinity PDL1 binding domain 2G4_H1.12_L1.24 with high affinity CD28 binding domain 1A7_H1.14_L1.71 as in XENP38512 enables a molecule having optimal biological activity, it turns out that XENP38512 suffered from less than ideal stability and antibody expression levels (data not shown). Accordingly, additional affinity variants were generated based on 2G4_H1.12_L1.24 by reverting or back mutating substitutions suspected to decrease stability and/or yield and/or to achieve a minimal necessary set of substitutions (relative to H1L1). Several binding domains including 2G4_H1.12_L1.14, 2G4_H1.12_L1.66, and 2G4_H1.12_L1.68 were identified which demonstrated 4.5° C. improved Tₘ in comparison to 2G4_H1.12_L1.24 as well as improved yield while maintaining high affinity PDL1 binding. Additionally, codon optimization was investigated.

[0484] In a further experiment, PDL1 binding domains 2G4_H1.12_L1.24 (0.17 nM), 2G4_H1.12_L1.66 (0.86 nM), 2G4_H1.12_L1.68 (0.80 nM), or 2G4_H1.12_L1.14 (0.42 nM) binding affinities were paired with CD28 binding domain having 37 nM binding affinity (1A7_H1.14_L1.71) and investigated in a reverse CAR-T experiment (wherein test articles were incubated with CD3+ enriched T cells, MDA-MB-231 transfected to express αCD3 scFv (to act as Signal 1)), and 1 μg/mL of an illustrative B7H3×CD3 bsAb. It should be noted that XENP38512 and XENP40036 have the same amino acid but were expressed from different codons. The data as depicted in FIG. 66 show that the stability/production optimized variants enabled similar IL2 induction as compared to 2G4_H1.12_L1.24 albeit with XENP40409 (non-Xtend analog of XENP40706, containing 2G4_H1.12_L1.14) inducing IL2 production most potently.

### Example 7: PDL1×CD28 bsAbs Selectively Induce Proliferation of Effector T Cells in Cynomolgus Monkeys

[0485] Cynomolgus monkeys were dosed with XENP36803 (1× dose, 4× dose, and 10× dose) or XENP36764 (4× dose, 10× dose, and 20× dose) to investigate pharmacodynamics of the PDL1×CD28 bsAbs of the invention. Data from the study show that CD28 receptor occupancy is detected up to day 14 on T cells (FIG. 67) and PDL1 receptor occupancy is detected in activated monocytes (FIG. 68). Finally as depicted in FIG. 70, it was found that the PDL1×CD28 bsAbs demonstrate cytokine-like activity in selectively inducing proliferation of effector CD4+ and CD8+ T cells, particularly CD45RA− subsets. Notably, XENP36764 in the 1+1 Fab-scFv-Fc format having monovalent binding for PDL1 induced proliferation more efficaciously than XENP36803 in the 2+1 mAb-scFv format having bivalent binding for PDL1.

The application's sequence listing, which the Patent Office published only in electronic form, follows.

SEQUENCE LISTING (1591 sequences)

SEQ ID NO: 1 - protein, 121 aa, synthetic construct
  REGION 1..121: note = Description of Artificial Sequence: Synthetic polypeptide
  REGION 1..121: note = CD28.3[CD28]_H0L0 Variable heavy (vh) domain
EVKLQQSGAELVKPGASVRLSCKASGYTFTEYIIHWIKLRSGQGLEWIGWFYPGSNDIQYNAKFKGKATLTADKSSSTVYMELTGLTSEDSAVYFCARRDDFSGYDALPYWGQGTMVTVSS

SEQ ID NO: 2 - protein, 5 aa, synthetic construct
  REGION 1..5: note = Description of Artificial Sequence: Synthetic peptide
  REGION 1..5: note = CD28.3[CD28]_H0L0 vhCDR1
EYIIH

SEQ ID NO: 3 - protein, 17 aa, synthetic construct
  REGION 1..17: note = Description of Artificial Sequence: Synthetic peptide
  REGION 1..17: note = CD28.3[CD28]_H0L0 vhCDR2
WFYPGSNDIQYNAKFKG

SEQ ID NO: 4 - protein, 12 aa, synthetic construct
  REGION 1..12: note = Description of Artificial Sequence: Synthetic peptide
  REGION 1..12: note = CD28.3[CD28]_H0L0 vhCDR3
RDDFSGYDALPY

SEQ ID NO: 5 - protein, 107 aa, synthetic construct
  REGION 1..107: note = Description of Artificial Sequence: Synthetic polypeptide
  REGION 1..107: note = CD28.3[CD28]_H0L0 Variable light (vl) domain
DIQMTQSPASLSVSVGETVTITCRTNENIYSNLAWYQQKQGKSPQLLIYAATHLVEGVPSRFSGSGSGTQYSLKITSLQSEDFGNYYCQHFWGTPCTFGGGTKLEIK

SEQ ID NO: 6 - protein, 11 aa, synthetic construct
  REGION 1..11: note = Description of Artificial Sequence: Synthetic peptide
  REGION 1..11: note = CD28.3[CD28]_H0L0 vlCDR1
RTNENIYSNLA

SEQ ID NO: 7 - protein, 7 aa, synthetic construct
  REGION 1..7: note = Description of Artificial Sequence: Synthetic peptide
  REGION 1..7: note = CD28.3[CD28]_H0L0 vlCDR2
AATHLVE

SEQ ID NO: 8 - protein, 9 aa, synthetic construct
  REGION 1..9: note = Description of Artificial Sequence: Synthetic peptide
  REGION 1..9: note = CD28.3[CD28]_H0L0 vlCDR3
QHFWGTPCT

SEQ ID NO: 9 - protein, 121 aa, synthetic construct
  REGION 1..121: note = Description of Artificial Sequence: Synthetic polypeptide
  REGION 1..121: note = hCD28.3[CD28]_H1L1 Variable heavy (vh) domain
QVQLQQSGAELKKPGASVKVSCKASGYTFTEYIIHWIKLRSGQGLEWIGWFYPGSNDIQYNAQFKGKATLTADKSSSTVYMELTGLTPEDSAVYFCARRDDFSGYDALPYWGQGTLVTVSA

SEQ ID NO: 10 - protein, 5 aa, synthetic construct
  REGION 1..5: note = Description of Artificial Sequence: Synthetic peptide
  REGION 1..5: note = hCD28.3[CD28]_H1L1 vhCDR1
EYIIH

SEQ ID NO: 11 - protein, 17 aa, synthetic construct
  REGION 1..17: note = Description of Artificial Sequence: Synthetic peptide
  REGION 1..17: note = hCD28.3[CD28]_H1L1 vhCDR2
WFYPGSNDIQYNAQFKG

SEQ ID NO: 12 - protein, 12 aa, synthetic construct
  REGION 1..12: note = Description of Artificial Sequence: Synthetic peptide
  REGION 1..12: note = hCD28.3[CD28]_H1L1 vhCDR3
RDDFSGYDALPY

SEQ ID NO: 13 - protein, 107 aa, synthetic construct
  REGION 1..107: note = Description of Artificial Sequence: Synthetic polypeptide
  REGION 1..107: note = hCD28.3[CD28]_H1L1 Variable light (vl) domain
DIQMTQSPSSLSASVGDRVTITCKTNENIYSNLAWYQQKDGKSPQLLIYAATHLVEGVPSRFSGSGSGTQYSLTISSLQPEDFGNYYCQHFWGTPCTFGGGTKLEIK

SEQ ID NO: 14 - protein, 11 aa, synthetic construct
  REGION 1..11: note = Description of Artificial Sequence: Synthetic peptide
  REGION 1..11: note = hCD28.3[CD28]_H1L1 vlCDR1
KTNENIYSNLA

SEQ ID NO: 15 - protein, 7 aa, synthetic construct
  REGION 1..7: note = Description of Artificial Sequence: Synthetic peptide
  REGION 1..7: note = hCD28.3[CD28]_H1L1 vlCDR2
AATHLVE

SEQ ID NO: 16 - protein, 9 aa, synthetic construct
  REGION 1..9: note = Description of Artificial Sequence: Synthetic peptide
  REGION 1..9: note = hCD28.3[CD28]_H1L1 vlCDR3
QHFWGTPCT

SEQ ID NO: 17 - protein, 120 aa, synthetic construct
  REGION 1..120: note = Description of Artificial Sequence: Synthetic polypeptide
  REGION 1..120: note = 5.11A1[CD28]_H0L0 Variable heavy (vh) domain
QVQLQQSGPELVKPGTSVRISCEASGYTFTSYYIHWVKQRPGQGLEWIGCIYPGNVNTNYNEKFKDKATLIVDTSSNTAYMQLSRMTSEDSAVYFCTRSHYGLDWNFDVWGAGTTVTVSS

SEQ ID NO: 18 - protein, 5 aa, synthetic construct
  REGION 1..5: note = Description of Artificial Sequence: Synthetic peptide
  REGION 1..5: note = 5.11A1[CD28]_H0L0 vhCDR1
SYYIH

SEQ ID NO: 19 - protein, 17 aa, synthetic construct
  REGION 1..17: note = Description of Artificial Sequence: Synthetic peptide
  REGION 1..17: note = 5.11A1[CD28]_H0L0 vhCDR2
CIYPGNVNTNYNEKFKD

SEQ ID NO: 20 - protein, 11 aa, synthetic construct
  REGION 1..11: note = Description of Artificial Sequence: Synthetic peptide
  REGION 1..11: note = 5.11A1[CD28]_H0L0 vhCDR3
SHYGLDWNFDV

SEQ ID NO: 21 - protein, 107 aa, synthetic construct
  REGION 1..107: note = Description of Artificial Sequence: Synthetic polypeptide
  REGION 1..107: note = 5.11A1[CD28]_H0L0 Variable light (vl) domain
DIQMNQSPSSLSASLGDTITITCHASQNIYVWLNWYQQKPGNIPKLLIYKASNLHTGVPSRFSGSGSGTGFTLTISSLQPEDIATYYCQQGQTYPYTFGGGTKLEIK

SEQ ID NO: 22 - protein, 11 aa, synthetic construct
  REGION 1..11: note = Description of Artificial Sequence: Synthetic peptide
  REGION 1..11: note = 5.11A1[CD28]_H0L0 vlCDR1
HASQNIYVWLN

SEQ ID NO: 23 - protein, 7 aa, synthetic construct
  REGION 1..7: note = Description of Artificial Sequence: Synthetic peptide
  REGION 1..7: note = 5.11A1[CD28]_H0L0 vlCDR2
KASNLHT

SEQ ID NO: 24 - protein, 9 aa, synthetic construct
  REGION 1..9: note = Description of Artificial Sequence: Synthetic peptide
  REGION 1..9: note = 5.11A1[CD28]_H0L0 vlCDR3
QQGQTYPYT

SEQ ID NO: 25 - protein, 120 aa, synthetic construct
  REGION 1..120: note = Description of Artificial Sequence: Synthetic polypeptide
  REGION 1..120: note = TGN1412_H1L1 Variable heavy (vh) domain
QVQLVQSGAEVKKPGASVKVSCKASGYTFTSYYIHWVRQAPGQGLEWIGCIYPGNVNTNYNEKFKDRATLTVDTSISTAYMELSRLRSDDTAVYFCTRSHYGLDWNFDVWGQGTTVTVSS

SEQ ID NO: 26 - protein, 5 aa, synthetic construct
  REGION 1..5: note = Description of Artificial Sequence: Synthetic peptide
  REGION 1..5: note = TGN1412_H1L1 vhCDR1
SYYIH

SEQ ID NO: 27 - protein, 17 aa, synthetic construct
  REGION 1..17: note = Description of Artificial Sequence: Synthetic peptide
  REGION 1..17: note = TGN1412_H1L1 vhCDR2
CIYPGNVNTNYNEKFKD

SEQ ID NO: 28 - protein, 11 aa, synthetic construct
  REGION 1..11: note = Description of Artificial Sequence: Synthetic peptide
  REGION 1..11: note = TGN1412_H1L1 vhCDR3
SHYGLDWNFDV

SEQ ID NO: 29 - protein, 107 aa, synthetic construct
  REGION 1..107: note = Description of Artificial Sequence: Synthetic polypeptide
  REGION 1..107: note = TGN1412_H1L1 Variable light (vl) domain
DIQMTQSPSSLSASVGDRVTITCHASQNIYVWLNWYQQKPGKAPKLLIYKASNLHTGVPSRFSGSGSGTDFTLTISSLQPEDFATYYCQQGQTYPYTFGGGTKVEIK

SEQ ID NO: 30 - protein, 11 aa, synthetic construct
  REGION 1..11: note = Description of Artificial Sequence: Synthetic peptide
  REGION 1..11: note = TGN1412_H1L1 vlCDR1
HASQNIYVWLN

SEQ ID NO: 31 - protein, 7 aa, synthetic construct
  REGION 1..7: note = Description of Artificial Sequence: Synthetic peptide
  REGION 1..7: note = TGN1412_H1L1 vlCDR2
KASNLHT

SEQ ID NO: 32 - protein, 9 aa, synthetic construct
  REGION 1..9: note = Description of Artificial Sequence: Synthetic peptide
  REGION 1..9: note = TGN1412_H1L1 vlCDR3
QQGQTYPYT

SEQ ID NO: 33 - protein, 127 aa, synthetic construct
  REGION 1..127: note = Description of Artificial Sequence: Synthetic polypeptide
  REGION 1..127: note = 341VL34[CD28]_H1L1 Variable heavy (vh) domain
EVQLVESGGGLVKPGGSLRLSCGGSGFTFNNAWMNWVRQAPGKGLEWVGRIKGKTDGGTADYAAPVKGRFTISRDYSKNTLYLQMNSLTTEDTAVYYCNTDLPYYYGSGRYSGMDVWGQGTTVTVSS

SEQ ID NO: 34 - protein, 5 aa, synthetic construct
  REGION 1..5: note = Description of Artificial Sequence: Synthetic peptide
  REGION 1..5: note = 341VL34[CD28]_H1L1 vhCDR1
NAWMN

SEQ ID NO: 35 - protein, 19 aa, synthetic construct
  REGION 1..19: note = Description of Artificial Sequence: Synthetic peptide
  REGION 1..19: note = 341VL34[CD28]_H1L1 vhCDR2
RIKGKTDGGTADYAAPVKG

SEQ ID NO: 36 - protein, 16 aa, synthetic construct
  REGION 1..16: note = Description of Artificial Sequence: Synthetic peptide
  REGION 1..16: note = 341VL34[CD28]_H1L1 vhCDR3
DLPYYYGSGRYSGMDV

SEQ ID NO: 37 - protein, 104 aa, synthetic construct
  REGION 1..104: note = Description of Artificial Sequence: Synthetic polypeptide
  REGION 1..104: note = 341VL34[CD28]_H1L1 Variable light (vl) domain
EIVLTQSPATLSLSPGERATLSCRASQSVSSYLAWYQQKPGQAPRLLIYDASNRATGIPARFSGSGSGTDFTLTISSLEPEDFAVYYCQQRSNTFGPGTKVDIK

SEQ ID NO: 38 - protein, 11 aa, synthetic construct
  REGION 1..11: note = Description of Artificial Sequence: Synthetic peptide
  REGION 1..11: note = 341VL34[CD28]_H1L1 vlCDR1
RASQSVSSYLA

SEQ ID NO: 39 - protein, 7 aa, synthetic construct
  REGION 1..7: note = Description of Artificial Sequence: Synthetic peptide
  REGION 1..7: note = 341VL34[CD28]_H1L1 vlCDR2
DASNRAT

SEQ ID NO: 40 - protein, 6 aa, synthetic construct
  REGION 1..6: note = Description of Artificial Sequence: Synthetic peptide
  REGION 1..6: note = 341VL34[CD28]_H1L1 vlCDR3
QQRSNT

SEQ ID NO: 41 - protein, 127 aa, synthetic construct
  REGION 1..127: note = Description of Artificial Sequence: Synthetic polypeptide
  REGION 1..127: note = 341VL36[CD28]_H1L1 Variable heavy (vh) domain
EVQLVESGGGLVKPGGSLRLSCGGSGFTFNNAWMNWVRQAPGKGLEWVGRIKGKTDGGTADYAAPVKGRFTISRDYSKNTLYLQMNSLKTEDTGVYYCTTYLPYYYGSERWSGMDVWGQGTTVTVSS

SEQ ID NO: 42 - protein, 5 aa, synthetic construct
  REGION 1..5: note = Description of Artificial Sequence: Synthetic peptide
  REGION 1..5: note = 341VL36[CD28]_H1L1 vhCDR1
NAWMN

SEQ ID NO: 43 - protein, 19 aa, synthetic construct
  REGION 1..19: note = Description of Artificial Sequence: Synthetic peptide
  REGION 1..19: note = 341VL36[CD28]_H1L1 vhCDR2
RIKGKTDGGTADYAAPVKG

SEQ ID NO: 44 - protein, 16 aa, synthetic construct
  REGION 1..16: note = Description of Artificial Sequence: Synthetic peptide
  REGION 1..16: note = 341VL36[CD28]_H1L1 vhCDR3
YLPYYYGSERWSGMDV

SEQ ID NO: 45 - protein, 104 aa, synthetic construct; identical to SEQ ID NO: 37
  REGION 1..104: note = Description of Artificial Sequence: Synthetic polypeptide
  REGION 1..104: note = 341VL36[CD28]_H1L1 Variable light (vl) domain

SEQ ID NO: 46 - protein, 11 aa, synthetic construct
  REGION 1..11: note = Description of Artificial Sequence: Synthetic peptide
  REGION 1..11: note = 341VL36[CD28]_H1L1 vlCDR1
RASQSVSSYLA

SEQ ID NO: 47 - protein, 7 aa, synthetic construct
  REGION 1..7: note = Description of Artificial Sequence: Synthetic peptide
  REGION 1..7: note = 341VL36[CD28]_H1L1 vlCDR2
DASNRAT

SEQ ID NO: 48 - protein, 6 aa, synthetic construct
  REGION 1..6: note = Description of Artificial Sequence: Synthetic peptide
  REGION 1..6: note = 341VL36[CD28]_H1L1 vlCDR3
QQRSNT

SEQ ID NO: 49 - protein, 126 aa, synthetic construct
  REGION 1..126: note = Description of Artificial Sequence: Synthetic polypeptide
  REGION 1..126: note = 281VL4[CD28]_H1L1 Variable heavy (vh) domain
EVQLVQSGSELKKPGSSVKVSCKASGGTSRSFAISWVRQAPGQGLEWMGGIIPIFGPANYAQKFQGRVTITADESTSTAYMELSSLRSEDTAVYYCARHAIAMGWGVITTNYFDSWGQGTMVTVSS

SEQ ID NO: 50 - protein, 5 aa, synthetic construct
  REGION 1..5: note = Description of Artificial Sequence: Synthetic peptide
  REGION 1..5: note = 281VL4[CD28]_H1L1 vhCDR1
SFAIS

SEQ ID NO: 51 - protein, 17 aa, synthetic construct
  REGION 1..17: note = Description of Artificial Sequence: Synthetic peptide
  REGION 1..17: note = 281VL4[CD28]_H1L1 vhCDR2
GIIPIFGPANYAQKFQG

SEQ ID NO: 52 - protein, 17 aa, synthetic construct
  REGION 1..17: note = Description of Artificial Sequence: Synthetic peptide
  REGION 1..17: note = 281VL4[CD28]_H1L1 vhCDR3
HAIAMGWGVITTNYFDS

SEQ ID NO: 53 - protein, 108 aa, synthetic construct
  REGION 1..108: note = Description of Artificial Sequence: Synthetic polypeptide
  REGION 1..108: note = 281VL4[CD28]_H1L1 Variable light (vl) domain
EIVLTQSPGTLSLSPGERATLSCRASQSVSSSYLAWYQQKPGQAPRLLIYGASSRATGIPDRFSGSGSGTDFTLTISRLEPEDFAVYYCQQYGSSPITFGQGTRLEIK

SEQ ID NO: 54 - protein, 12 aa, synthetic construct
  REGION 1..12: note = Description of Artificial Sequence: Synthetic peptide
  REGION 1..12: note = 281VL4[CD28]_H1L1 vlCDR1
RASQSVSSSYLA

SEQ ID NO: 55 - protein, 7 aa, synthetic construct
  REGION 1..7: note = Description of Artificial Sequence: Synthetic peptide
  REGION 1..7: note = 281VL4[CD28]_H1L1 vlCDR2
GASSRAT

SEQ ID NO: 56 - protein, 9 aa, synthetic construct
  REGION 1..9: note = Description of Artificial Sequence: Synthetic peptide
  REGION 1..9: note = 281VL4[CD28]_H1L1 vlCDR3
QQYGSSPIT

SEQ ID NO: 57 - protein, 121 aa, synthetic construct
  REGION 1..121: note = Description of Artificial Sequence: Synthetic polypeptide
  REGION 1..121: note = HuTN228[CD28]_H1L1 Variable heavy (vh) domain
QVQLQESGPGLVKPSETLSLTCAVSGFSLTSYGVHWIRQPPGKGLEWLGVIWPGGGTNFNSALMSRLTISEDTSKNQVSLKLSSVTAADTAVYYCARDRAYGNYLYAMDYWGQGTLVTVSS

SEQ ID NO: 58 - protein, 5 aa, synthetic construct
  REGION 1..5: note = Description of Artificial Sequence: Synthetic peptide
  REGION 1..5: note = HuTN228[CD28]_H1L1 vhCDR1
SYGVH

SEQ ID NO: 59 - protein, 16 aa, synthetic construct
  REGION 1..16: note = Description of Artificial Sequence: Synthetic peptide
  REGION 1..16: note = HuTN228[CD28]_H1L1 vhCDR2
VIWPGGGTNFNSALMS

SEQ ID NO: 60 - protein, 13 aa, synthetic construct
  REGION 1..13: note = Description of Artificial Sequence: Synthetic peptide
  REGION 1..13: note = HuTN228[CD28]_H1L1 vhCDR3
DRAYGNYLYAMDY

SEQ ID NO: 61 - protein, 111 aa, synthetic construct
  REGION 1..111: note = Description of Artificial Sequence: Synthetic polypeptide
  REGION 1..111: note = HuTN228[CD28]_H1L1 Variable light (vl) domain
DIQMTQSPSSLSASVGDRVTITCRASESVEYYVTSLMQWYQQKPGKAPKLLIYAASNVDSGVPSRFSGSGSGTDFTLTISSLQPEDIATYYCQQSRKVPFTFGGGTKVEIK

SEQ ID NO: 62 - protein, 15 aa, synthetic construct
  REGION 1..15: note = Description of Artificial Sequence: Synthetic peptide
  REGION 1..15: note = HuTN228[CD28]_H1L1 vlCDR1
RASESVEYYVTSLMQ

SEQ ID NO: 63 - protein, 7 aa, synthetic construct
  REGION 1..7: note = Description of Artificial Sequence: Synthetic peptide
  REGION 1..7: note = HuTN228[CD28]_H1L1 vlCDR2
AASNVDS

SEQ ID NO: 64 - protein, 9 aa, synthetic construct
  REGION 1..9: note = Description of Artificial Sequence: Synthetic peptide
  REGION 1..9: note = HuTN228[CD28]_H1L1 vlCDR3
QQSRKVPFT

SEQ ID NO: 65 - protein, 124 aa, synthetic construct
  REGION 1..124: note = Description of Artificial Sequence: Synthetic polypeptide
  REGION 1..124: note = PV1[CD28]_H0L0 Variable heavy (vh) domain
QVQLKQSGAELVKPGASVKISCKTSGYTFTDGYMNWVEQKPGQGLEWIGRIDPDSGNTRYNQKFQGKATLTRDKSSSTVYMDLRSLTSEDSAVYYCARDGTFYGTYGYWYFDFWGQGTQVTVSS

SEQ ID NO: 66 - protein, 5 aa, synthetic construct
  REGION 1..5: note = Description of Artificial Sequence: Synthetic peptide
  REGION 1..5: note = PV1[CD28]_H0L0 vhCDR1
DGYMN

SEQ ID NO: 67 - protein, 17 aa, synthetic construct
  REGION 1..17: note = Description of Artificial Sequence: Synthetic peptide
  REGION 1..17: note = PV1[CD28]_H0L0 vhCDR2
RIDPDSGNTRYNQKFQG

SEQ ID NO: 68 - protein, 15 aa, synthetic construct
  REGION 1..15: note = Description of Artificial Sequence: Synthetic peptide
  REGION 1..15: note = PV1[CD28]_H0L0 vhCDR3
DGTFYGTYGYWYFDF

SEQ ID NO: 69 - protein, 113 aa, synthetic construct
  REGION 1..113: note = Description of Artificial Sequence: Synthetic polypeptide
  REGION 1..113: note = PV1[CD28]_H0L0 Variable light (vl) domain
DIVMTQSPYSLAVSAGEKVTMSCRSSQSLYYSGIKKNLLAWYQQKPGQSPKLLIYFTSTRLPGVPDRFTGSGSGTDYTLTITSVQAEDMGHYFCQQGISTPLTFGDGTKLEIR

SEQ ID NO: 70 - protein, 17 aa, synthetic construct
  REGION 1..17: note = Description of Artificial Sequence: Synthetic peptide
  REGION 1..17: note = PV1[CD28]_H0L0 vlCDR1
RSSQSLYYSGIKKNLLA

SEQ ID NO: 71 - protein, 7 aa, synthetic construct
  REGION 1..7: note = Description of Artificial Sequence: Synthetic peptide
  REGION 1..7: note = PV1[CD28]_H0L0 vlCDR2
FTSTRLP

SEQ ID NO: 72 - protein, 9 aa, synthetic construct
  REGION 1..9: note = Description of Artificial Sequence: Synthetic peptide
  REGION 1..9: note = PV1[CD28]_H0L0 vlCDR3
QQGISTPLT

SEQ ID NO: 73 - protein, 120 aa, synthetic construct
  REGION 1..120: note = Description of Artificial Sequence: Synthetic polypeptide
  REGION 1..120: note = m9.3[CD28]_H0L0 Variable heavy (vh) domain
EVKLQQSGPGLVTPSQSLSITCTVSGFSLSDYGVHWVRQSPGQGLEWLGVIWAGGGTNYNSALMSRKSISKDNSKSQVFLKMNSLQADDTAVYYCARDKGYSYYYSMDYWGQGTSVTVSS

SEQ ID NO: 74 - protein, 5 aa, synthetic construct
  REGION 1..5: note = Description of Artificial Sequence: Synthetic peptide
  REGION 1..5: note = m9.3[CD28]_H0L0 vhCDR1
DYGVH

SEQ ID NO: 75 - protein, 16 aa, synthetic construct
  REGION 1..16: note = Description of Artificial Sequence: Synthetic peptide
  REGION 1..16: note = m9.3[CD28]_H0L0 vhCDR2
VIWAGGGTNYNSALMS

SEQ ID NO: 76 - protein, 12 aa, synthetic construct
  REGION 1..12: note = Description of Artificial Sequence: Synthetic peptide
  REGION 1..12: note = m9.3[CD28]_H0L0 vhCDR3
DKGYSYYYSMDY

SEQ ID NO: 77 - protein, 111 aa, synthetic construct
  REGION 1..111: note = Description of Artificial Sequence: Synthetic polypeptide
  REGION 1..111: note = m9.3[CD28]_H0L0 Variable light (vl) domain
DIELTQSPASLAVSLGQRATISCRASESVEYYVTSLMQWYQQKPGQPPKLLIFAASNVESGVPARFSGSGSGTNFSLNIHPVDEDDVAMYFCQQSRKVPYTFGGGTKLEIK

SEQ ID NO: 78 - protein, 15 aa, synthetic construct
  REGION 1..15: note = Description of Artificial Sequence: Synthetic peptide
  REGION 1..15: note = m9.3[CD28]_H0L0 vlCDR1
RASESVEYYVTSLMQ

SEQ ID NO: 79 - protein, 7 aa, synthetic construct
  REGION 1..7: note = Description of Artificial Sequence: Synthetic peptide
  REGION 1..7: note = m9.3[CD28]_H0L0 vlCDR2
AASNVES

SEQ ID NO: 80 - protein, 9 aa, synthetic construct
  REGION 1..9: note = Description of Artificial Sequence: Synthetic peptide
  REGION 1..9: note = m9.3[CD28]_H0L0 vlCDR3
QQSRKVPYT

SEQ ID NO: 81 - protein, 120 aa, synthetic construct
  REGION 1..120: note = Description of Artificial Sequence: Synthetic polypeptide
  REGION 1..120: note = hu9.3[CD28]_H1L1 Variable heavy (vh) domain
EVQLVQSGGGLVQPGGSLRLSCAGSGFTFSDYGVHWVRQAPGKGLEWVSAIWAGGGTNYASSVMGRFTISRDNAKNSLYLQMNSLRAEDMAVYYCARDKGYSYYYSMDYWGQGTLVTVSS

SEQ ID NO: 82 - protein, 5 aa, synthetic construct
  REGION 1..5: note = Description of Artificial Sequence: Synthetic peptide
  REGION 1..5: note = hu9.3[CD28]_H1L1 vhCDR1
DYGVH

SEQ ID NO: 83 - protein, 16 aa, synthetic construct
  REGION 1..16: note = Description of Artificial Sequence: Synthetic peptide
  REGION 1..16: note = hu9.3[CD28]_H1L1 vhCDR2
AIWAGGGTNYASSVMG

SEQ ID NO: 84 - protein, 12 aa, synthetic construct
  REGION 1..12: note = Description of Artificial Sequence: Synthetic peptide
  REGION 1..12: note = hu9.3[CD28]_H1L1 vhCDR3
DKGYSYYYSMDY

SEQ ID NO: 85 - protein, 111 aa, synthetic construct
  REGION 1..111: note = Description of Artificial Sequence: Synthetic polypeptide
  REGION 1..111: note = hu9.3[CD28]_H1L1 Variable light (vl) domain
DIVMTQSPDSLAVSLGERATINCRASESVEYYVTSLMAWYQQKPGQPPKLLIYAASNVESGVPDRFSGSGSGTNFSLTISSLQAEDVAVYYCQQSRKVPYTFGQGTKLEIK

SEQ ID NO: 86 - protein, 15 aa, synthetic construct
  REGION 1..15: note = Description of Artificial Sequence: Synthetic peptide
  REGION 1..15: note = hu9.3[CD28]_H1L1 vlCDR1
RASESVEYYVTSLMA

SEQ ID NO: 87 - protein, 7 aa, synthetic construct
  REGION 1..7: note = Description of Artificial Sequence: Synthetic peptide
  REGION 1..7: note = hu9.3[CD28]_H1L1 vlCDR2
AASNVES

SEQ ID NO: 88 - protein, 9 aa, synthetic construct
  REGION 1..9: note = Description of Artificial Sequence: Synthetic peptide
  REGION 1..9: note = hu9.3[CD28]_H1L1 vlCDR3
QQSRKVPYT

SEQ ID NO: 89 - protein, 121 aa, synthetic construct
  REGION 1..121: note = Description of Artificial Sequence: Synthetic polypeptide
  REGION 1..121: note = 2.14H9 OPT Variable heavy (vh) domain
EVQLVESGGGLVQPGGSLRLSCAASGFTFSRYWMSWVRQAPGKGLEWVANIKQDGSEKYYVDSVKGRFTISRDNAKNSLYLQMNSLRAEDTAVYYCAREGGWFGELAFDYWGQGTLVTVSS

SEQ ID NO: 90 - protein, 5 aa, synthetic construct
  REGION 1..5: note = Description of Artificial Sequence: Synthetic peptide
  REGION 1..5: note = 2.14H9 OPT vhCDR1
RYWMS

SEQ ID NO: 91 - protein, 17 aa, synthetic construct
  REGION 1..17: note = Description of Artificial Sequence: Synthetic peptide
  REGION 1..17: note = 2.14H9 OPT vhCDR2
NIKQDGSEKYYVDSVKG

SEQ ID NO: 92 - protein, 12 aa, synthetic construct
  REGION 1..12: note = Description of Artificial Sequence: Synthetic peptide
  REGION 1..12: note = 2.14H9 OPT vhCDR3
EGGWFGELAFDY

SEQ ID NO: 93 - protein, 108 aa, synthetic construct
  REGION 1..108: note = Description of Artificial Sequence: Synthetic polypeptide
  REGION 1..108: note = 2.14H9 OPT Variable light (vl) domain
EIVLTQSPGTLSLSPGERATLSCRASQRVSSSYLAWYQQKPGQAPRLLIYDASSRATGIPDRFSGSGSGTDFTLTISRLEPEDFAVYYCQQYGSLPWTFGQGTKVEIK

SEQ ID NO: 94 - protein, 12 aa, synthetic construct
  REGION 1..12: note = Description of Artificial Sequence: Synthetic peptide
  REGION 1..12: note = 2.14H9 OPT vlCDR1
RASQRVSSSYLA

SEQ ID NO: 95 - protein, 7 aa, synthetic construct
  REGION 1..7: note = Description of Artificial Sequence: Synthetic peptide
  REGION 1..7: note = 2.14H9 OPT vlCDR2
DASSRAT

SEQ ID NO: 96 - protein, 9 aa, synthetic construct
  REGION 1..9: note = Description of Artificial Sequence: Synthetic peptide
  REGION 1..9: note = 2.14H9 OPT vlCDR3
QQYGSLPWT

SEQ ID NO: 97 - protein, 118 aa, synthetic construct
  REGION 1..118: note = Description of Artificial Sequence: Synthetic polypeptide
  REGION 1..118: note = atezolizumab Variable heavy (vh) domain
EVQLVESGGGLVQPGGSLRLSCAASGFTFSDSWIHWVRQAPGKGLEWVAWISPYGGSTYYADSVKGRFTISADTSKNTAYLQMNSLRAEDTAVYYCARRHWPGGFDYWGQGTLVTVSA

SEQ ID NO: 98 - protein, 5 aa, synthetic construct
  REGION 1..5: note = Description of Artificial Sequence: Synthetic peptide
  REGION 1..5: note = atezolizumab vhCDR1
DSWIH

SEQ ID NO: 99 - protein, 17 aa, synthetic construct
  REGION 1..17: note = Description of Artificial Sequence: Synthetic peptide
  REGION 1..17: note = atezolizumab vhCDR2
WISPYGGSTYYADSVKG

SEQ ID NO: 100 - protein, 9 aa, synthetic construct
  REGION 1..9: note = Description of Artificial Sequence: Synthetic peptide
  REGION 1..9: note = atezolizumab vhCDR3
RHWPGGFDY

SEQ ID NO: 101 - protein, 107 aa, synthetic construct [sequence omitted]

SEQ ID NO: 102 - protein, 11 aa, synthetic construct
  REGION 1..11: note = Description of Artificial Sequence: Synthetic peptide
  REGION 1..11: note = atezolizumab vlCDR1
RASQDVSTAVA

SEQ ID NO: 103 - protein, 7 aa, synthetic construct
  REGION 1..7: note = Description of Artificial Sequence: Synthetic peptide
  REGION 1..7: note = atezolizumab vlCDR2
SASFLYS

SEQ ID NO: 104 - protein, 9 aa, synthetic construct
  REGION 1..9: note = Description of Artificial Sequence: Synthetic peptide
  REGION 1..9: note = atezolizumab vlCDR3
QQYLYHPAT

SEQ ID NO: 105 - protein, 120 aa, synthetic construct
  REGION 1..120: note = Description of Artificial Sequence: Synthetic polypeptide
  REGION 1..120: note = avelumab Variable heavy (vh) domain
EVQLLESGGGLVQPGGSLRLSCAASGFTFSSYIMMWVRQAPGKGLEWVSSIYPSGGITFYADTVKGRFTISRDNSKNTLYLQMNSLRAEDTAVYYCARIKLGTVTTVDYWGQGTLVTVSS

SEQ ID NO: 106 - protein, 5 aa, synthetic construct
  REGION 1..5: note = Description of Artificial Sequence: Synthetic peptide
  REGION 1..5: note = avelumab vhCDR1
SYIMM

SEQ ID NO: 107 - protein, 17 aa, synthetic construct
  REGION 1..17: note = Description of Artificial Sequence: Synthetic peptide
  REGION 1..17: note = avelumab vhCDR2
SIYPSGGITFYADTVKG

SEQ ID NO: 108 - protein, 11 aa, synthetic construct
  REGION 1..11: note = Description of Artificial Sequence: Synthetic peptide
  REGION 1..11: note = avelumab vhCDR3
IKLGTVTTVDY

SEQ ID NO: 109 - protein, 110 aa, synthetic construct
  REGION 1..110: note = Description of Artificial Sequence: Synthetic polypeptide
  REGION 1..110: note = avelumab Variable light (vl) domain
QSALTQPASVSGSPGQSITISCTGTSSDVGGYNYVSWYQQHPGKAPKLMIYDVSNRPSGVSNRFSGSKSGNTASLTISGLQAEDEADYYCSSYTSSSTRVFGTGTKVTVL

SEQ ID NO: 110 - protein, 14 aa, synthetic construct
  REGION 1..14: note = Description of Artificial Sequence: Synthetic peptide
  REGION 1..14: note = avelumab vlCDR1
TGTSSDVGGYNYVS

SEQ ID NO: 111 - protein, 7 aa, synthetic construct
  REGION 1..7: note = Description of Artificial Sequence: Synthetic peptide
  REGION 1..7: note = avelumab vlCDR2
DVSNRPS

SEQ ID NO: 112 - protein, 10 aa, synthetic construct
  REGION 1..10: note = Description of Artificial Sequence: Synthetic peptide
  REGION 1..10: note = avelumab vlCDR3
SSYTSSSTRV

SEQ ID NO: 113 - protein, 123 aa, synthetic construct
  REGION 1..123: note = Description of Artificial Sequence: Synthetic polypeptide
  REGION 1..123: note = 12A4 Variable heavy (vh) domain
QVQLVQSGAEVKKPGSSVKVSCKTSGDTFSTYAISWVRQAPGQGLEWMGGIIPIFGKAHYAQKFQGRVTITADESTSTAYMELSSLRSEDTAVYFCARKFHFVSGSPFGMDVWGQGTTVTVSS

SEQ ID NO: 114 - protein, 5 aa, synthetic construct
  REGION 1..5: note = Description of Artificial Sequence: Synthetic peptide
  REGION 1..5: note = 12A4 vhCDR1
TYAIS

SEQ ID NO: 115 - protein, 17 aa, synthetic construct
  REGION 1..17: note = Description of Artificial Sequence: Synthetic peptide
  REGION 1..17: note = 12A4 vhCDR2
GIIPIFGKAHYAQKFQG

SEQ ID NO: 116 - protein, 14 aa, synthetic construct
  REGION 1..14: note = Description of Artificial Sequence: Synthetic peptide
  REGION 1..14: note = 12A4 vhCDR3
KFHFVSGSPFGMDV

SEQ ID NO: 117 - protein, 106 aa, synthetic construct
  REGION 1..106: note = Description of Artificial Sequence: Synthetic polypeptide
  REGION 1..106: note = 12A4 Variable light (vl) domain
EIVLTQSPATLSLSPGERATLSCRASQSVSSYLAWYQQKPGQAPRLLIYDASNRATGIPARFSGSGSGTDFTLTISSLEPEDFAVYYCQQRSNWPTFGQGTKVEIK

SEQ ID NO: 118 - protein, 11 aa, synthetic construct
  REGION 1..11: note = Description of Artificial Sequence: Synthetic peptide
  REGION 1..11: note = 12A4 vlCDR1
RASQSVSSYLA

SEQ ID NO: 119 - protein, 7 aa, synthetic construct
  REGION 1..7: note = Description of Artificial Sequence: Synthetic peptide
  REGION 1..7: note = 12A4 vlCDR2
DASNRAT

SEQ ID NO: 120 - protein, 8 aa, synthetic construct
  REGION 1..8: note = Description of Artificial Sequence: Synthetic peptide
  REGION 1..8: note = 12A4 vlCDR3
QQRSNWPT

SEQ ID NO: 121 - protein, 117 aa, synthetic construct
  REGION 1..117: note = Description of Artificial Sequence: Synthetic polypeptide
  REGION 1..117: note = 3G10 Variable heavy (vh) domain
QVQLVQSGAEVKKPGASVKVSCKASGYTFTDYGFSWVRQAPGQGLEWMGWITAYNGNTNYAQKLQGRVTMTTDTSTSTVYMELRSLRSDDTAVYYCARDYFYGMDVWGQGTTVTVSS

SEQ ID NO: 122 - protein, 5 aa, synthetic construct
  REGION 1..5: note = Description of Artificial Sequence: Synthetic peptide
  REGION 1..5: note = 3G10 vhCDR1
DYGFS

SEQ ID NO: 123 - protein, 17 aa, synthetic construct
  REGION 1..17: note = Description of Artificial Sequence: Synthetic peptide
  REGION 1..17: note = 3G10 vhCDR2
WITAYNGNTNYAQKLQG

SEQ ID NO: 124 - protein, 8 aa, synthetic construct
  REGION 1..8: note = Description of Artificial Sequence: Synthetic peptide
  REGION 1..8: note = 3G10 vhCDR3
DYFYGMDV

SEQ ID NO: 125 - protein, 107 aa, synthetic construct
  REGION 1..107: note = Description of Artificial Sequence: Synthetic polypeptide
  REGION 1..107: note = 3G10 Variable light (vl) domain
EIVLTQSPATLSLSPGERATLSCRASQSVSSYLVWYQQKPGQAPRLLIYDASNRATGIPARFSGSGSGTDFTLTISSLEPEDFAVYYCQQRSNWPRTFGQGTKVEIK

SEQ ID NO: 126 - protein, 11 aa, synthetic construct
  REGION 1..11: note = Description of Artificial Sequence: Synthetic peptide
  REGION 1..11: note = 3G10 vlCDR1
RASQSVSSYLV

SEQ ID NO: 127 - protein, 7 aa, synthetic construct
  REGION 1..7: note = Description of Artificial Sequence: Synthetic peptide
  REGION 1..7: note = 3G10 vlCDR2
DASNRAT

SEQ ID NO: 128 - protein, 9 aa, synthetic construct
  REGION 1..9: note = Description of Artificial Sequence: Synthetic peptide
  REGION 1..9: note = 3G10 vlCDR3
QQRSNWPRT

SEQ ID NO: 129 - protein, 118 aa, synthetic construct
  REGION 1..118: note = Description of Artificial Sequence: Synthetic polypeptide
  REGION 1..118: note = 10A5 Variable heavy (vh) domain
QVQLVQSGAEVKKPGASVKVSCKASGYTFTSYDVHWVRQAPGQRLEWMGWLHADTGITKFSQKFQGRVTITRDTSASTAYMELSSLRSEDTAVYYCARERIQLWFDYWGQGTLVTVSS

SEQ ID NO: 130 - protein, 5 aa, synthetic construct
  REGION 1..5: note = Description of Artificial Sequence: Synthetic peptide
  REGION 1..5: note = 10A5 vhCDR1
SYDVH

SEQ ID NO: 131 - protein, 17 aa, synthetic construct
  REGION 1..17: note = Description of Artificial Sequence: Synthetic peptide
  REGION 1..17: note = 10A5 vhCDR2
WLHADTGITKFSQKFQG

SEQ ID NO: 132 - protein, 9 aa, synthetic construct
  REGION 1..9: note = Description of Artificial Sequence: Synthetic peptide
  REGION 1..9: note = 10A5 vhCDR3
ERIQLWFDY

SEQ ID NO: 133 - protein, 107 aa, synthetic construct
  REGION 1..107: note = Description of Artificial Sequence: Synthetic polypeptide
  REGION 1..107: note = 10A5 Variable light (vl) domain
DIQMTQSPSSLSASVGDRVTITCRASQGISSWLAWYQQKPEKAPKSLIYAASSLQSGVPSRFSGSGSGTDFTLTISSLQPEDFATYYCQQYNSYPYTFGQGTKLEIK

SEQ ID NO: 134 - protein, 11 aa, synthetic construct
  REGION 1..11: note = Description of Artificial Sequence: Synthetic peptide
  REGION 1..11: note = 10A5 vlCDR1
RASQGISSWLA

SEQ ID NO: 135 - protein, 7 aa, synthetic construct
  REGION 1..7: note = Description of Artificial Sequence: Synthetic peptide
  REGION 1..7: note = 10A5 vlCDR2
AASSLQS

SEQ ID NO: 136 - protein, 9 aa, synthetic construct
  REGION 1..9: note = Description of Artificial Sequence: Synthetic peptide
  REGION 1..9: note = 10A5 vlCDR3
QQYNSYPYT

SEQ ID NO: 137 - protein, 114 aa, synthetic construct
  REGION 1..114: note = Description of Artificial Sequence: Synthetic polypeptide
  REGION 1..114: note = h3D10 Var1 Variable heavy (vh) domain
QVQLVQSGAEVKKPGASVKVSCKASGYTFPDYYMNWVRQAPGQGLEWMGDIDPNYGGTNYAQKFQGRVTMTRDTSISTAYMELSRLRSDDTAVYYCARGALTDWGQGTMVTVSS

SEQ ID NO: 138 - protein, 5 aa, synthetic construct
  REGION 1..5: note = Description of Artificial Sequence: Synthetic peptide
  REGION 1..5: note = h3D10 Var1 vhCDR1
DYYMN

SEQ ID NO: 139 - protein, 17 aa, synthetic construct
  REGION 1..17: note = Description of Artificial Sequence: Synthetic peptide
  REGION 1..17: note = h3D10 Var1 vhCDR2
DIDPNYGGTNYAQKFQG

SEQ ID NO: 140 - protein, 5 aa, synthetic construct
  REGION 1..5: note = Description of Artificial Sequence: Synthetic peptide
  REGION 1..5: note = h3D10 Var1 vhCDR3
GALTD

SEQ ID NO: 141 - protein, 106 aa, synthetic construct
  REGION 1..106: note = Description of Artificial Sequence: Synthetic polypeptide
  REGION 1..106: note = h3D10 Var1 Variable light (vl) domain
EIVLTQSPATLSLSPGERATLSCRASSSVSYIYWFQQKPGQAPRLLIYAAFNRATGIPARFSGSGSGTDYTLTISSLEPEDFAVYYCQQWSNNPLTFGQGTKVEIK

SEQ ID NO: 142 - protein, 10 aa, synthetic construct
  REGION 1..10: note = Description of Artificial Sequence: Synthetic peptide
  REGION 1..10: note = h3D10 Var1 vlCDR1
RASSSVSYIY

SEQ ID NO: 143 - protein, 7 aa, synthetic construct
  REGION 1..7: note = Description of Artificial Sequence: Synthetic peptide
  REGION 1..7: note = h3D10 Var1 vlCDR2
AAFNRAT

SEQ ID NO: 144 - protein, 9 aa, synthetic construct
  REGION 1..9: note = Description of Artificial Sequence: Synthetic peptide
  REGION 1..9: note = h3D10 Var1 vlCDR3
QQWSNNPLT

SEQ ID NO: 145 - protein, 114 aa, synthetic construct
  REGION 1..114: note = Description of Artificial Sequence: Synthetic polypeptide
  REGION 1..114: note = h3D10 Var2 Variable heavy (vh) domain
QVQLVQSGAEVKKPGASVKVSCKASGYTFPDYYMNWVRQAPGQSLEWMGDIDPNYGGTNYNQKFQGRVTMTRDTSISTAYMELSRLRSDDTAVYYCARGALTDWGQGTMVTVSS

SEQ ID NO: 146 - protein, 5 aa, synthetic construct
  REGION 1..5: note = Description of Artificial Sequence: Synthetic peptide
  REGION 1..5: note = h3D10 Var2 vhCDR1
DYYMN

SEQ ID NO: 147 - protein, 17 aa, synthetic construct
  REGION 1..17: note = Description of Artificial Sequence: Synthetic peptide
  REGION 1..17: note = h3D10 Var2 vhCDR2
DIDPNYGGTNYNQKFQG

SEQ ID NO: 148 - protein, 5 aa, synthetic construct
  REGION 1..5: note = Description of Artificial Sequence: Synthetic peptide
  REGION 1..5: note = h3D10 Var2 vhCDR3
GALTD

SEQ ID NO: 149 - protein, 106 aa, synthetic construct
  REGION 1..106: note = Description of Artificial Sequence: Synthetic polypeptide
  REGION 1..106: note = h3D10 Var2 Variable light (vl) domain
EIVLTQSPATLSLSPGERATLSCRASSSVSYIYWFQQKPGQSPRPLIYAAFNRATGIPARFSGSGSGTDYTLTISSLEPEDFAVYYCQQWSNNPLTFGQGTKVEIK

SEQ ID NO: 150 - protein, 10 aa, synthetic construct
  REGION 1..10: note = Description of Artificial Sequence: Synthetic peptide
  REGION 1..10: note = h3D10 Var2 vlCDR1
RASSSVSYIY

SEQ ID NO: 151 - protein, 7 aa, synthetic construct
  REGION 1..7: note = Description of Artificial Sequence: Synthetic peptide
  REGION 1..7: note = h3D10 Var2 vlCDR2
AAFNRAT

SEQ ID NO: 152 - protein, 9 aa, synthetic construct
  REGION 1..9: note = Description of Artificial Sequence: Synthetic peptide
  REGION 1..9: note = h3D10 Var2 vlCDR3
QQWSNNPLT

SEQ ID NO: 153 - protein, 114 aa, synthetic construct; identical to SEQ ID NO: 145
  REGION 1..114: note = Description of Artificial Sequence: Synthetic polypeptide
  REGION 1..114: note = h3D10 Var3 Variable heavy (vh) domain

SEQ ID NO: 154 - protein, 5 aa, synthetic construct
  REGION 1..5: note = Description of Artificial Sequence: Synthetic peptide
  REGION 1..5: note = h3D10 Var3 vhCDR1
DYYMN

SEQ ID NO: 155 - protein, 17 aa, synthetic construct
  REGION 1..17: note = Description of Artificial Sequence: Synthetic peptide
  REGION 1..17: note = h3D10 Var3 vhCDR2
DIDPNYGGTNYNQKFQG

SEQ ID NO: 156 - protein, 5 aa, synthetic construct
  REGION 1..5: note = Description of Artificial Sequence: Synthetic peptide
  REGION 1..5: note = h3D10 Var3 vhCDR3
GALTD

SEQ ID NO: 157 - protein, 106 aa, synthetic construct
  REGION 1..106: note = Description of Artificial Sequence: Synthetic polypeptide
  REGION 1..106: note = h3D10 Var3 Variable light (vl) domain
QIVLTQSPATLSLSPGERATLSCRASSSVSYIYWFQQKPGQSPRPLIYATFNLASGIPARFSGSGSGTSYTLTISRLEPEDFAVYYCQQWSNNPLTFGQGTKVEIK

SEQ ID NO: 158 - protein, 10 aa, synthetic construct
  REGION 1..10: note = Description of Artificial Sequence: Synthetic peptide
  REGION 1..10: note = h3D10 Var3 vlCDR1
RASSSVSYIY

SEQ ID NO: 159 - protein, 7 aa, synthetic construct
  REGION 1..7: note = Description of Artificial Sequence: Synthetic peptide
  REGION 1..7: note = h3D10 Var3 vlCDR2
ATFNLAS

SEQ ID NO: 160 - protein, 9 aa, synthetic construct
  REGION 1..9: note = Description of Artificial Sequence: Synthetic peptide
  REGION 1..9: note = h3D10 Var3 vlCDR3
QQWSNNPLT

SEQ ID NO: 161 - protein, 114 aa, synthetic construct
  REGION 1..114: note = Description of Artificial Sequence: Synthetic polypeptide
  REGION 1..114: note = h3D10 Var4 Variable heavy (vh) domain
EVQLVQSGAEVKKPGASVKVSCKASGYTFPDYYMNWVRQAPGQSLEWMGDIDPNYGGTNYNQKFQGRVTMTVDRSSSTAYMELSRLRSDDTAVYYCARGALTDWGQGTMVTVSS

SEQ ID NO: 162 - protein, 5 aa, synthetic construct
  REGION 1..5: note = Description of Artificial Sequence: Synthetic peptide
  REGION 1..5: note = h3D10 Var4 vhCDR1
DYYMN

SEQ ID NO: 163 - protein, 17 aa, synthetic construct
  REGION 1..17: note = Description of Artificial Sequence: Synthetic peptide
  REGION 1..17: note = h3D10 Var4 vhCDR2
DIDPNYGGTNYNQKFQG

SEQ ID NO: 164 - protein, 5 aa, synthetic construct
  REGION 1..5: note = Description of Artificial Sequence: Synthetic peptide
  REGION 1..5: note = h3D10 Var4 vhCDR3
GALTD

SEQ ID NO: 165 - protein, 106 aa, synthetic construct; identical to SEQ ID NO: 149
  REGION 1..106: note = Description of Artificial Sequence: Synthetic polypeptide
  REGION 1..106: note = h3D10 Var4 Variable light (vl) domain

SEQ ID NO: 166 - protein, 10 aa, synthetic construct
  REGION 1..10: note = Description of Artificial Sequence: Synthetic peptide
  REGION 1..10: note = h3D10 Var4 vlCDR1
RASSSVSYIY

SEQ ID NO: 167 - protein, 7 aa, synthetic construct
  REGION 1..7: note = Description of Artificial Sequence: Synthetic peptide
  REGION 1..7: note = h3D10 Var4 vlCDR2
AAFNRAT

SEQ ID NO: 168 - protein, 9 aa, synthetic construct
  REGION 1..9: note = Description of Artificial Sequence: Synthetic peptide
  REGION 1..9: note = h3D10 Var4 vlCDR3
QQWSNNPLT

SEQ ID NO: 169 - protein, 114 aa, synthetic construct
  REGION 1..114: note = Description of Artificial Sequence: Synthetic polypeptide
  REGION 1..114: note = h3D10 Var5 Variable heavy (vh) domain
EVQLVESGGGLVQPGRSLRLSCTASGYTFPDYYMNWVRQAPGKGLEWVGDIDPNYGGTTYNQSVKGRFTISVDRSKSIAYLQMSSLKTEDTAVYYCARGALTDWGQGTMVTVSS

SEQ ID NO: 170 - protein, 5 aa, synthetic construct
  REGION 1..5: note = Description of Artificial Sequence: Synthetic peptide
  REGION 1..5: note = h3D10 Var5 vhCDR1
DYYMN

SEQ ID NO: 171 - protein, 17 aa, synthetic construct
  REGION 1..17: note = Description of Artificial Sequence: Synthetic peptide
  REGION 1..17: note = h3D10 Var5 vhCDR2
DIDPNYGGTTYNQSVKG

SEQ ID NO: 172 - protein, 5 aa, synthetic construct
  REGION 1..5: note = Description of Artificial Sequence: Synthetic peptide
  REGION 1..5: note = h3D10 Var5 vhCDR3
GALTD

SEQ ID NO: 173 - protein, 106 aa, synthetic construct
  REGION 1..106: note = Description of Artificial Sequence: Synthetic polypeptide
  REGION 1..106: note = h3D10 Var5 Variable light (vl) domain
DIQLTQSPSILSASVGDRVTITCRASSSVSYIYWFQQKPGKAPKPLIYATFNLASGVPSRFSGSGSGTSYTLTISSLQPEDFATYYCQQWSNNPLTFGQGTKVEIK

SEQ ID NO: 174 - protein, 10 aa, synthetic construct
  REGION 1..10: note = Description of Artificial Sequence: Synthetic peptide
  REGION 1..10: note = h3D10 Var5 vlCDR1
RASSSVSYIY

SEQ ID NO: 175 - protein, 7 aa, synthetic construct
  REGION 1..7: note = Description of Artificial Sequence: Synthetic peptide
  REGION 1..7: note = h3D10 Var5 vlCDR2
ATFNLAS

SEQ ID NO: 176 - protein, 9 aa, synthetic construct
  REGION 1..9: note = Description of Artificial Sequence: Synthetic peptide
  REGION 1..9: note = h3D10 Var5 vlCDR3
QQWSNNPLT

SEQ ID NO: 177 - protein, 114 aa, synthetic construct
  REGION 1..114: note = Description of Artificial Sequence: Synthetic polypeptide
  REGION 1..114: note = h3D10 Var6 Variable heavy (vh) domain
EVQLVESGGGLVQPGRSLRLSCTASGYTFPDYYMNWVRQAPGKGLEWVGDIDPNYGGTTYAASVKGRFTISVDRSKSIAYLQMSSLKTEDTAVYYCTRGALTDWGQGTMVTVSS

SEQ ID NO: 178 - protein, 5 aa, synthetic construct
  REGION 1..5: note = Description of Artificial Sequence: Synthetic peptide
  REGION 1..5: note = h3D10 Var6 vhCDR1
DYYMN

SEQ ID NO: 179 - protein, 17 aa, synthetic construct
  REGION 1..17: note = Description of Artificial Sequence: Synthetic peptide
  REGION 1..17: note = h3D10 Var6 vhCDR2
DIDPNYGGTTYAASVKG

SEQ ID NO: 180 - protein, 5 aa, synthetic construct
  REGION 1..5: note = Description of Artificial Sequence: Synthetic peptide
  REGION 1..5: note = h3D10 Var6 vhCDR3
GALTD

SEQ ID NO: 181 - protein, 106 aa, synthetic construct; identical to SEQ ID NO: 141
  REGION 1..106: note = Description of Artificial Sequence: Synthetic polypeptide
  REGION 1..106: note = h3D10 Var6 Variable light (vl) domain

SEQ ID NO: 182 - protein, 10 aa, synthetic construct
  REGION 1..10: note = Description of Artificial Sequence: Synthetic peptide
  REGION 1..10: note = h3D10 Var6 vlCDR1
RASSSVSYIY

SEQ ID NO: 183 - protein, 7 aa, synthetic construct
  REGION 1..7: note = Description of Artificial Sequence: Synthetic peptide
  REGION 1..7: note = h3D10 Var6 vlCDR2
AAFNRAT

SEQ ID NO: 184 - protein, 9 aa, synthetic construct
  REGION 1..9: note = Description of Artificial Sequence: Synthetic peptide
  REGION 1..9: note = h3D10 Var6 vlCDR3
QQWSNNPLT

SEQ ID NO: 185 - protein, 114 aa, synthetic construct; identical to SEQ ID NO: 137
  REGION 1..114: note = Description of Artificial Sequence: Synthetic polypeptide
  REGION 1..114: note = h3D10 Var7 Variable heavy (vh) domain

SEQ ID NO: 186 - protein, 5 aa, synthetic construct
  REGION 1..5: note = Description of Artificial Sequence: Synthetic peptide
  REGION 1..5: note = h3D10 Var7 vhCDR1
DYYMN

SEQ ID NO: 187 - protein, 17 aa, synthetic construct
  REGION 1..17: note = Description of Artificial Sequence: Synthetic peptide
  REGION 1..17: note = h3D10 Var7 vhCDR2
DIDPNYGGTNYAQKFQG

SEQ ID NO: 188 - protein, 5 aa, synthetic construct
  REGION 1..5: note = Description of Artificial Sequence: Synthetic peptide
  REGION 1..5: note = h3D10 Var7 vhCDR3
GALTD

SEQ ID NO: 189 - protein, 106 aa, synthetic construct
  REGION 1..106: note = Description of Artificial Sequence: Synthetic polypeptide
  REGION 1..106: note = h3D10 Var7 Variable light (vl) domain
DIQLTQSPSSLSASVGDRVTITCRASSGVSYIYWFQQKPGKAPKLLIYAAFNLASGVPSRFSGSGSGTEYTLTISSLQPEDFATYYCQQWSNNPLTFGQGTKVEIK

SEQ ID NO: 190 - protein, 10 aa, synthetic construct
  REGION 1..10: note = Description of Artificial Sequence: Synthetic peptide
  REGION 1..10: note = h3D10 Var7 vlCDR1
RASSGVSYIY

SEQ ID NO: 191 - protein, 7 aa, synthetic construct
  REGION 1..7: note = Description of Artificial Sequence: Synthetic peptide
  REGION 1..7: note = h3D10 Var7 vlCDR2
AAFNLAS

SEQ ID NO: 192 - protein, 9 aa, synthetic construct
  REGION 1..9: note = Description of Artificial Sequence: Synthetic peptide
  REGION 1..9: note = h3D10 Var7 vlCDR3
QQWSNNPLT

SEQ ID NO: 193 - protein, 114 aa, synthetic construct; identical to SEQ ID NO: 169
  REGION 1..114: note = Description of Artificial Sequence: Synthetic polypeptide
  REGION 1..114: note = h3D10 Var8 Variable heavy (vh) domain

SEQ ID NO: 194 - protein, 5 aa, synthetic construct
  REGION 1..5: note = Description of Artificial Sequence: Synthetic peptide
  REGION 1..5: note = h3D10 Var8 vhCDR1
DYYMN

SEQ ID NO: 195 - protein, 17 aa, synthetic construct
  REGION 1..17: note = Description of Artificial Sequence: Synthetic peptide
  REGION 1..17: note = h3D10 Var8 vhCDR2
DIDPNYGGTTYNQSVKG

SEQ ID NO: 196 - protein, 5 aa, synthetic construct
  REGION 1..5: note = Description of Artificial Sequence: Synthetic peptide
  REGION 1..5: note = h3D10 Var8 vhCDR3
GALTD

SEQ ID NO: 197 - protein, 106 aa, synthetic construct; identical to SEQ ID NO: 157
  REGION 1..106: note = Description of Artificial Sequence: Synthetic polypeptide
  REGION 1..106: note = h3D10 Var8 Variable light (vl) domain

SEQ ID NO: 198 - protein, 10 aa, synthetic construct
  REGION 1..10: note = Description of Artificial Sequence: Synthetic peptide
  REGION 1..10: note = h3D10 Var8 vlCDR1
RASSSVSYIY

SEQ ID NO: 199 - protein, 7 aa, synthetic construct
  REGION 1..7: note = Description of Artificial Sequence: Synthetic peptide
  REGION 1..7: note = h3D10 Var8 vlCDR2
ATFNLAS

SEQ ID NO: 200 - protein, 9 aa, synthetic construct
  REGION 1..9: note = Description of Artificial Sequence: Synthetic peptide
  REGION 1..9: note = h3D10 Var8 vlCDR3
QQWSNNPLT

SEQ ID NO: 201 - protein, 114 aa, synthetic construct; identical to SEQ ID NO: 169
  REGION 1..114: note = Description of Artificial Sequence: Synthetic polypeptide
  REGION 1..114: note = h3D10 Var9 Variable heavy (vh) domain

SEQ ID NO: 202 - protein, 5 aa, synthetic construct
  REGION 1..5: note = Description of Artificial Sequence: Synthetic peptide
  REGION 1..5: note = h3D10 Var9 vhCDR1
DYYMN

SEQ ID NO: 203 - protein, 17 aa, synthetic construct
  REGION 1..17: note = Description of Artificial Sequence: Synthetic peptide
  REGION 1..17: note = h3D10 Var9 vhCDR2
DIDPNYGGTTYNQSVKG

SEQ ID NO: 204 - protein, 5 aa, synthetic construct
  REGION 1..5: note = Description of Artificial Sequence: Synthetic peptide
  REGION 1..5: note = h3D10 Var9 vhCDR3
GALTD

SEQ ID NO: 205 - protein, 106 aa, synthetic construct
  REGION 1..106: note = Description of Artificial Sequence: Synthetic polypeptide
  REGION 1..106: note = h3D10 Var9 Variable light (vl) domain
DIQLTQSPSSLSASVGDRVTITCRASSGVSYIYWFQQKPGKAPKPLIYAAFNLASGVPSRFSGSGSGTEYTLTISSLQPEDFATYYCQQWSNNPLTFGQGTKVEIK

SEQ ID NO: 206 - protein, 10 aa, synthetic construct
  REGION 1..10: note = Description of Artificial Sequence: Synthetic peptide
  REGION 1..10: note = h3D10 Var9 vlCDR1
RASSGVSYIY

SEQ ID NO: 207 - protein, 7 aa, synthetic construct
  REGION 1..7: note = Description of Artificial Sequence: Synthetic peptide
  REGION 1..7: note = h3D10 Var9 vlCDR2
AAFNLAS

SEQ ID NO: 208 - protein, 9 aa, synthetic construct
  REGION 1..9: note = Description of Artificial Sequence: Synthetic peptide
  REGION 1..9: note = h3D10 Var9 vlCDR3
QQWSNNPLT

SEQ ID NO: 209 - protein, 114 aa, synthetic construct; identical to SEQ ID NO: 169
  REGION 1..114: note = Description of Artificial Sequence: Synthetic polypeptide
  REGION 1..114: note = h3D10 Var10 Variable heavy (vh) domain

SEQ ID NO: 210 - protein, 5 aa, synthetic construct
  REGION 1..5: note = Description of Artificial Sequence: Synthetic peptide
  REGION 1..5: note = h3D10 Var10 vhCDR1
DYYMN

SEQ ID NO: 211 - protein, 17 aa, synthetic construct
  REGION 1..17: note = Description of Artificial Sequence: Synthetic peptide
  REGION 1..17: note = h3D10 Var10 vhCDR2
DIDPNYGGTTYNQSVKG

SEQ ID NO: 212 - protein, 5 aa, synthetic construct
  REGION 1..5: note = Description of Artificial Sequence: Synthetic peptide
  REGION 1..5: note = h3D10 Var10 vhCDR3
GALTD

SEQ ID NO: 213 - protein, 106 aa, synthetic construct; identical to SEQ ID NO: 173
  REGION 1..106: note = Description of Artificial Sequence: Synthetic polypeptide
  REGION 1..106: note = h3D10 Var10 Variable light (vl) domain

SEQ ID NO: 214 - protein, 10 aa, synthetic construct
  REGION 1..10: note = Description of Artificial Sequence: Synthetic peptide
  REGION 1..10: note = h3D10 Var10 vlCDR1
RASSSVSYIY

SEQ ID NO: 215 - protein, 7 aa, synthetic construct
  REGION 1..7: note = Description of Artificial Sequence: Synthetic peptide
  REGION 1..7: note = h3D10 Var10 vlCDR2
ATFNLAS

SEQ ID NO: 216 - protein, 9 aa, synthetic construct
  REGION 1..9: note = Description of Artificial Sequence: Synthetic peptide
  REGION 1..9: note = h3D10 Var10 vlCDR3
QQWSNNPLT

SEQ ID NO: 217 - protein, 114 aa, synthetic construct; identical to SEQ ID NO: 177
  REGION 1..114: note = Description of Artificial Sequence: Synthetic polypeptide
  REGION 1..114: note = h3D10 Var11 Variable heavy (vh) domain

SEQ ID NO: 218 - protein, 5 aa, synthetic construct
  REGION 1..5: note = Description of Artificial Sequence: Synthetic peptide
  REGION 1..5: note = h3D10 Var11 vhCDR1
DYYMN

SEQ ID NO: 219 - protein, 17 aa, synthetic construct
  REGION 1..17: note = Description of Artificial Sequence: Synthetic peptide
  REGION 1..17: note = h3D10 Var11 vhCDR2
DIDPNYGGTTYAASVKG

SEQ ID NO: 220 - protein, 5 aa, synthetic construct
  REGION 1..5: note = Description of Artificial Sequence: Synthetic peptide
  REGION 1..5: note = h3D10 Var11 vhCDR3
GALTD

SEQ ID NO: 221 - protein, 106 aa, synthetic construct; identical to SEQ ID NO: 141
  REGION 1..106: note = Description of Artificial Sequence: Synthetic polypeptide
  REGION 1..106: note = h3D10 Var11 Variable light (vl) domain

SEQ ID NO: 222 - protein, 10 aa, synthetic construct
  REGION 1..10: note = Description of Artificial Sequence: Synthetic peptide
  REGION 1..10: note = h3D10 Var11 vlCDR1
RASSSVSYIY

SEQ ID NO: 223 - protein, 7 aa, synthetic construct
  REGION 1..7: note = Description of Artificial Sequence: Synthetic peptide
  REGION 1..7: note = h3D10 Var11 vlCDR2
AAFNRAT

SEQ ID NO: 224 - protein, 9 aa, synthetic construct
  REGION 1..9: note = Description of Artificial Sequence: Synthetic peptide
  REGION 1..9: note = h3D10 Var11 vlCDR3
QQWSNNPLT

SEQ ID NO: 225 - protein, 114 aa, synthetic construct; identical to SEQ ID NO: 137
  REGION 1..114: note = Description of Artificial Sequence: Synthetic polypeptide
  REGION 1..114: note = h3D10 Var12 Variable heavy (vh) domain

SEQ ID NO: 226 - protein, 5 aa, synthetic construct
  REGION 1..5: note = Description of Artificial Sequence: Synthetic peptide
  REGION 1..5: note = h3D10 Var12 vhCDR1
DYYMN

SEQ ID NO: 227 - protein, 17 aa, synthetic construct
  REGION 1..17: note = Description of Artificial Sequence: Synthetic peptide
  REGION 1..17: note = h3D10 Var12 vhCDR2
DIDPNYGGTNYAQKFQG

SEQ ID NO: 228 - protein, 5 aa, synthetic construct
  REGION 1..5: note = Description of Artificial Sequence: Synthetic peptide
  REGION 1..5: note = h3D10 Var12 vhCDR3
GALTD

SEQ ID NO: 229 - protein, 106 aa, synthetic construct; identical to SEQ ID NO: 189
  REGION 1..106: note = Description of Artificial Sequence: Synthetic polypeptide
  REGION 1..106: note = h3D10 Var12 Variable light (vl) domain

SEQ ID NO: 230 - protein, 10 aa, synthetic construct
  REGION 1..10: note = Description of Artificial Sequence: Synthetic peptide
  REGION 1..10: note = h3D10 Var12 vlCDR1
RASSGVSYIY

SEQ ID NO: 231 - protein, 7 aa, synthetic construct
  REGION 1..7: note = Description of Artificial Sequence: Synthetic peptide
  REGION 1..7: note = h3D10 Var12 vlCDR2
AAFNLAS

SEQ ID NO: 232 - protein, 9 aa, synthetic construct
  REGION 1..9: note = Description of Artificial Sequence: Synthetic peptide
  REGION 1..9: note = h3D10 Var12 vlCDR3
QQWSNNPLT

SEQ ID NO: 233 - protein, 114 aa, synthetic construct; identical to SEQ ID NO: 169
  REGION 1..114: note = Description of Artificial Sequence: Synthetic polypeptide
  REGION 1..114: note = h3D10 Var13 Variable heavy (vh) domain

SEQ ID NO: 234 - protein, 5 aa, synthetic construct
  REGION 1..5: note = Description of Artificial Sequence: Synthetic peptide
  REGION 1..5: note = h3D10 Var13 vhCDR1
DYYMN

SEQ ID NO: 235 - protein, 17 aa, synthetic construct
  REGION 1..17: note = Description of Artificial Sequence: Synthetic peptide
  REGION 1..17: note = h3D10 Var13 vhCDR2
DIDPNYGGTTYNQSVKG

SEQ ID NO: 236 - protein, 5 aa, synthetic construct
  REGION 1..5: note = Description of Artificial Sequence: Synthetic peptide
  REGION 1..5: note = h3D10 Var13 vhCDR3
GALTD

SEQ ID NO: 237 - protein, 106 aa, synthetic construct; identical to SEQ ID NO: 157
  REGION 1..106: note = Description of Artificial Sequence: Synthetic polypeptide
  REGION 1..106: note = h3D10 Var13 Variable light (vl) domain

SEQ ID NO: 238 - protein, 10 aa, synthetic construct
  REGION 1..10: note = Description of Artificial Sequence: Synthetic peptide
  REGION 1..10: note = h3D10 Var13 vlCDR1
RASSSVSYIY

SEQ ID NO: 239 - protein, 7 aa, synthetic construct
  REGION 1..7: note = Description of Artificial Sequence: Synthetic peptide
  REGION 1..7: note = h3D10 Var13 vlCDR2
ATFNLAS

SEQ ID NO: 240 - protein, 9 aa, synthetic construct
  REGION 1..9: note = Description of Artificial Sequence: Synthetic peptide
  REGION 1..9: note = h3D10 Var13 vlCDR3
QQWSNNPLT

SEQ ID NO: 241 - protein, 114 aa, synthetic construct; identical to SEQ ID NO: 161
  REGION 1..114: note = Description of Artificial Sequence: Synthetic polypeptide
  REGION 1..114: note = h3D10 Var14 Variable heavy (vh) domain

SEQ ID NO: 242 - protein, 5 aa, synthetic construct
  REGION 1..5: note = Description of Artificial Sequence: Synthetic peptide
  REGION 1..5: note = h3D10 Var14 vhCDR1
DYYMN

SEQ ID NO: 243 - protein, 17 aa, synthetic construct
  REGION 1..17: note = Description of Artificial Sequence: Synthetic peptide
  REGION 1..17: note = h3D10 Var14 vhCDR2
DIDPNYGGTNYNQKFQG

SEQ ID NO: 244 - protein, 5 aa, synthetic construct
  REGION 1..5: note = Description of Artificial Sequence: Synthetic peptide
  REGION 1..5: note = h3D10 Var14 vhCDR3
GALTD

SEQ ID NO: 245 - protein, 106 aa, synthetic construct; identical to SEQ ID NO: 173
  REGION 1..106: note = Description of Artificial Sequence: Synthetic polypeptide
  REGION 1..106: note = h3D10 Var14 Variable light (vl) domain

SEQ ID NO: 246 - protein, 10 aa, synthetic construct
  REGION 1..10: note = Description of Artificial Sequence: Synthetic peptide
  REGION 1..10: note = h3D10 Var14 vlCDR1
RASSSVSYIY

SEQ ID NO: 247 - protein, 7 aa, synthetic construct
  REGION 1..7: note = Description of Artificial Sequence: Synthetic peptide
  REGION 1..7: note = h3D10 Var14 vlCDR2
ATFNLAS

SEQ ID NO: 248 - protein, 9 aa, synthetic construct
  REGION 1..9: note = Description of Artificial Sequence: Synthetic peptide
  REGION 1..9: note = h3D10 Var14 vlCDR3
QQWSNNPLT

SEQ ID NO: 249 - protein, 123 aa, synthetic construct
  REGION 1..123: note = Description of Artificial Sequence: Synthetic polypeptide
  REGION 1..123: note = Antibody A Variable heavy (vh) domain
QVQLVQSGAEVKKPGSSVKVSCKASGGTFSSYAISWVRQAPGQGLEWMGGIIPIFGTANYAQKFQGRVTITADKSTSTAYMELSSLRSEDTAVYYCARSPDYSPYYYYGMDVWGQGTTVTVSS

SEQ ID NO: 250 - protein, 5 aa, synthetic construct
  REGION 1..5: note = Description of Artificial Sequence: Synthetic peptide
  REGION 1..5: note = Antibody A vhCDR1
SYAIS

SEQ ID NO: 251 - protein, 17 aa, synthetic construct
  REGION 1..17: note = Description of Artificial Sequence: Synthetic peptide
  REGION 1..17: note = Antibody A vhCDR2
GIIPIFGTANYAQKFQG

SEQ ID NO: 252 - protein, 14 aa, synthetic construct
  REGION 1..14: note = Description of Artificial Sequence: Synthetic peptide
  REGION 1..14: note = Antibody A vhCDR3
SPDYSPYYYYGMDV

SEQ ID NO: 253 - protein, 110 aa, synthetic construct
  REGION 1..110: note = Description of Artificial Sequence: Synthetic polypeptide
  REGION 1..110: note = Antibody A Variable light (vl) domain
QSVLTQPPSASGTPGQRVTISCSGSSSNIGSNTVNWYQQLPGTAPKLLIYGNSNRPSGVPDRFSGSKSGTSASLAISGLQSEDEADYYCQSYDSSLSGSVFGGGIKLTVL

SEQ ID NO: 254 - protein, 13 aa, synthetic construct
  REGION 1..13: note = Description of Artificial Sequence: Synthetic peptide
  REGION 1..13: note = Antibody A vlCDR1
SGSSSNIGSNTVN

SEQ ID NO: 255 - protein, 7 aa, synthetic construct
  REGION 1..7: note = Description of Artificial Sequence: Synthetic peptide
  REGION 1..7: note = Antibody A vlCDR2
GNSNRPS

SEQ ID NO: 256 - protein, 11 aa, synthetic construct
  REGION 1..11: note = Description of Artificial Sequence: Synthetic peptide
  REGION 1..11: note = Antibody A vlCDR3
QSYDSSLSGSV

SEQ ID NO: 257 - protein, 116 aa, synthetic construct
  REGION 1..116: note = Description of Artificial Sequence: Synthetic polypeptide
  REGION 1..116: note = C5H9v2 Variable heavy (vh) domain
EVQLLESGGGLVQPGGSLRLSCAASGFTFSSYAMSWVRQAPGKGLEWVSSIWRNGIVTVYADSVKGRFTISRDNSKNTLYLQMNSLRAEDTAVYYCAKWSAAFDYWGQGTLVTVSS

SEQ ID NO: 258 - protein, 5 aa, synthetic construct
  REGION 1..5: note = Description of Artificial Sequence: Synthetic peptide
  REGION 1..5: note = C5H9v2 vhCDR1
SYAMS

SEQ ID NO: 259 - protein, 17 aa, synthetic construct
  REGION 1..17: note = Description of Artificial Sequence: Synthetic peptide
  REGION 1..17: note = C5H9v2 vhCDR2
SIWRNGIVTVYADSVKG

SEQ ID NO: 260 - protein, 7 aa, synthetic construct
  REGION 1..7: note = Description of Artificial Sequence: Synthetic peptide
  REGION 1..7: note = C5H9v2 vhCDR3
WSAAFDY

SEQ ID NO: 261 - protein, 107 aa, synthetic construct
  REGION 1..107: note = Description of Artificial Sequence: Synthetic polypeptide
  REGION 1..107: note = C5H9v2 Variable light (vl) domain
DIQMTQSPSSLSASVGDRVTITCRASQSISSYLNWYQQKPGKAPKLLIYAASSLQSGVPSRFSGSGSGTDFTLTISSLQPEDFATYYCQQDNGYPSTFGGGTKVEIK

SEQ ID NO: 262 - protein, 11 aa, synthetic construct
  REGION 1..11: note = Description of Artificial Sequence: Synthetic peptide
  REGION 1..11: note = C5H9v2 vlCDR1
RASQSISSYLN

SEQ ID NO: 263 - protein, 7 aa, synthetic construct
  REGION 1..7: note = Description of Artificial Sequence: Synthetic peptide
  REGION 1..7: note = C5H9v2 vlCDR2
AASSLQS

SEQ ID NO: 264 - protein, 9 aa, synthetic construct
  REGION 1..9: note = Description of Artificial Sequence: Synthetic peptide
  REGION 1..9: note = C5H9v2 vlCDR3
QQDNGYPST

SEQ ID NO: 265 - protein, 94 aa, synthetic construct
  REGION 1..94: note = Description of Artificial Sequence: Synthetic polypeptide
  REGION 1..94: note = Humanized 29E.2A3 Variable heavy (vh) domain
CKASGYTFTSYVMHWVKQAPGQRLEWIGYVNPFNDGTKYNEMFKGRATLTSDKSTSTAYMELSSLRSEDTAVYYCARQAWGYPWGQGTLVTVSS

SEQ ID NO: 266 - protein, 5 aa, synthetic construct
  REGION 1..5: note = Description of Artificial Sequence: Synthetic peptide
  REGION 1..5: note = Humanized 29E.2A3 vhCDR1
SYVMH

SEQ ID NO: 267 - protein, 17 aa, synthetic construct
  REGION 1..17: note = Description of Artificial Sequence: Synthetic peptide
  REGION 1..17: note = Humanized 29E.2A3 vhCDR2
YVNPFNDGTKYNEMFKG

SEQ ID NO: 268 - protein, 6 aa, synthetic construct
  REGION 1..6: note = Description of Artificial Sequence: Synthetic peptide
  REGION 1..6: note = Humanized 29E.2A3 vhCDR3
QAWGYP

SEQ ID NO: 269 - protein, 111 aa, synthetic construct
  REGION 1..111: note = Description of Artificial Sequence: Synthetic polypeptide
  REGION 1..111: note = Humanized 29E.2A3 Variable light (vl) domain
DIVLTQSPATLSLSPGERATLSCRATESVEYYGTSLVQWYQQKPGQPPKLLIYAASSVDSGVPSRFSGSGSGTDFTLTINSLEAEDAATYFCQQSRRVPYTFGQGTKLEIK

SEQ ID NO: 270 - protein, 15 aa, synthetic construct
  REGION 1..15: note = Description of Artificial Sequence: Synthetic peptide
  REGION 1..15: note = Humanized 29E.2A3 vlCDR1
RATESVEYYGTSLVQ

SEQ ID NO: 271 - protein, 7 aa, synthetic construct
  REGION 1..7: note = Description of Artificial Sequence: Synthetic peptide
  REGION 1..7: note = Humanized 29E.2A3 vlCDR2
AASSVDS

SEQ ID NO: 272 - protein, 9 aa, synthetic construct
  REGION 1..9: note = Description of Artificial Sequence: Synthetic peptide
  REGION 1..9: note = Humanized 29E.2A3 vlCDR3
QQSRRVPYT

SEQ ID NO: 273 - protein, 121 aa, synthetic construct
  REGION 1..121: note = Description of Artificial Sequence: Synthetic polypeptide
  REGION 1..121: note = 1B9 Variable heavy (vh) domain
DVQLQESGPGLVKPSQSLSLTCTVTGYSITSDHAWNWIRQVPGNKLEWMGYITYRGSTTYSPSLKSRISITRDTSKNQFFLQLNSVTTEDTATYYCARSMITTGYYVMDYWGQGTSVTVSS

SEQ ID NO: 274 - protein, 6 aa, synthetic construct
  REGION 1..6: note = Description of Artificial Sequence: Synthetic peptide
  REGION 1..6: note = 1B9 vhCDR1
SDHAWN

SEQ ID NO: 275 - protein, 16 aa, synthetic construct
  REGION 1..16: note = Description of Artificial Sequence: Synthetic peptide
  REGION 1..16: note = 1B9 vhCDR2
YITYRGSTTYSPSLKS

SEQ ID NO: 276 - protein, 12 aa, synthetic construct
  REGION 1..12: note = Description of Artificial Sequence: Synthetic peptide
  REGION 1..12: note = 1B9 vhCDR3
SMITTGYYVMDY

SEQ ID NO: 277 - protein, 107 aa, synthetic construct
  REGION 1..107: note = Description of Artificial Sequence: Synthetic polypeptide
  REGION 1..107: note = 1B9 Variable light (vl) domain
DIVMTQSHKFMSTSLGDRVTITCKASQDVGISVVWYQQKPGQSPKLLIYWASTRHTGVPDRFTGSGSGTDFTLTINNVQSEDLADYFCQQYSSYPLTVGAGTKLELK

SEQ ID NO: 278 - protein, 11 aa, synthetic construct
  REGION 1..11: note = Description of Artificial Sequence: Synthetic peptide
  REGION 1..11: note = 1B9 vlCDR1
KASQDVGISVV

SEQ ID NO: 279 - protein, 7 aa, synthetic construct
  REGION 1..7: note = Description of Artificial Sequence: Synthetic peptide
  REGION 1..7: note = 1B9 vlCDR2
WASTRHT

SEQ ID NO: 280 - protein, 9 aa, synthetic construct
  REGION 1..9: note = Description of Artificial Sequence: Synthetic peptide
  REGION 1..9: note = 1B9 vlCDR3
QQYSSYPLT

SEQ ID NO: 281 - protein, 121 aa, synthetic construct
  REGION 1..121: note = Description of Artificial Sequence: Synthetic polypeptide
  REGION 1..121: note = 4H1 Variable heavy (vh) domain
DVQLQESGPGLVKPSQSLSLTCTVTDYSITSDYAWTWIRQFPGNKLEWMGYITYRGTTRYNPSLTSRISFTRDTSKNQLFLQLNSVTTEDTGTYCCARSMITTGYYAMDYWGQGTSVTVSS

SEQ ID NO: 282 - protein, 6 aa, synthetic construct
  REGION 1..6: note = Description of Artificial Sequence: Synthetic peptide
  REGION 1..6: note = 4H1 vhCDR1
SDYAWT

SEQ ID NO: 283 - protein, 16 aa, synthetic construct
  REGION 1..16: note = Description of Artificial Sequence: Synthetic peptide
  REGION 1..16: note = 4H1 vhCDR2
YITYRGTTRYNPSLTS

SEQ ID NO: 284 - protein, 12 aa, synthetic construct
  REGION 1..12: note = Description of Artificial Sequence: Synthetic peptide
  REGION 1..12: note = 4H1 vhCDR3
SMITTGYYAMDY

SEQ ID NO: 285 - protein, 107 aa, synthetic construct
  REGION 1..107: note = Description of Artificial Sequence: Synthetic polypeptide
  REGION 1..107: note = 4H1 Variable light (vl) domain
DIVMTQSHKFMSTSVGDRVSISCKASQDVGISVAWYQQKPGQSPKLLIYWASTRHTGVPVRFTGSGSGTDFTLTISNVQSEDLADYFCQQYSSYPPTFGAGTKLELK

SEQ ID NO: 286 - protein, 11 aa, synthetic construct
  REGION 1..11: note = Description of Artificial Sequence: Synthetic peptide
  REGION 1..11: note = 4H1 vlCDR1
KASQDVGISVA

SEQ ID NO: 287 - protein, 7 aa, synthetic construct
  REGION 1..7: note = Description of Artificial Sequence: Synthetic peptide
  REGION 1..7: note = 4H1 vlCDR2
WASTRHT

SEQ ID NO: 288 - protein, 9 aa, synthetic construct
  REGION 1..9: note = Description of Artificial Sequence: Synthetic peptide
  REGION 1..9: note = 4H1 vlCDR3
QQYSSYPPT

SEQ ID NO: 289 - protein, 120 aa, synthetic construct
  REGION 1..120: note = Description of Artificial Sequence: Synthetic polypeptide
  REGION 1..120: note = mAb-42 Variable heavy (vh) domain
QVQLVQSGAEVKKPGSSVKVSCKASGGTFSSYAISWVRQAPGQGLEWMGGIIPIFGTANYAQKFQGRVTITADKSTSTAYMELSSLRSEDTAVYYCARGRQMFGAGIDFWGPGTLVTVSS

SEQ ID NO: 290 - protein, 5 aa, synthetic construct
  REGION 1..5: note = Description of Artificial Sequence: Synthetic peptide
  REGION 1..5: note = mAb-42 vhCDR1
SYAIS

SEQ ID NO: 291 - protein, 17 aa, synthetic construct
  REGION 1..17: note = Description of Artificial Sequence: Synthetic peptide
  REGION 1..17: note = mAb-42 vhCDR2
GIIPIFGTANYAQKFQG

SEQ ID NO: 292 - protein, 11 aa, synthetic construct
  REGION 1..11: note = Description of Artificial Sequence: Synthetic peptide
  REGION 1..11: note = mAb-42 vhCDR3
GRQMFGAGIDF

SEQ ID NO: 293 - protein, 112 aa, synthetic construct
  REGION 1..112: note = Description of Artificial Sequence: Synthetic polypeptide
  REGION 1..112: note = mAb-42 Variable light (vl) domain
NFMLTQPHSVSESPGKTVTISCTRSSGSIDSNYVQWYQQRPGSAPTTVIYEDNQRPSGVPDRFSGSIDSSSNSASLTISGLKTEDEADYYCQSYDSNNRHVIFGGGTKLTVL

SEQ ID NO: 294 - protein, 13 aa, synthetic construct
  REGION 1..13: note = Description of Artificial Sequence: Synthetic peptide
  REGION 1..13: note = mAb-42 vlCDR1
TRSSGSIDSNYVQ

SEQ ID NO: 295 - protein, 7 aa, synthetic construct
  REGION 1..7: note = Description of Artificial Sequence: Synthetic peptide
  REGION 1..7: note = mAb-42 vlCDR2
EDNQRPS

SEQ ID NO: 296 - protein, 11 aa, synthetic construct
  REGION 1..11: note = Description of Artificial Sequence: Synthetic peptide
  REGION 1..11: note = mAb-42 vlCDR3
QSYDSNNRHVI

SEQ ID NO: 297 - protein, 120 aa, synthetic construct
  REGION 1..120: note = Description of Artificial Sequence: Synthetic polypeptide
  REGION 1..120: note = BAP058-03 Variable heavy (vh) domain
EVQLVQSGAEVKKPGATVKISCKVSGYTFTSYWMYWVRQATGQGLEWMGRIDPNSGSTKYNEKFKNRVTITADKSTSTAYMELSSLRSEDTAVYYCARDYRKGLYAMDYWGQGTTVTVSS

SEQ ID NO: 298 - protein, 5 aa, synthetic construct
  REGION 1..5: note = Description of Artificial Sequence: Synthetic peptide
  REGION 1..5: note = BAP058-03 vhCDR1
SYWMY

SEQ ID NO: 299 - protein, 17 aa, synthetic construct
  REGION 1..17: note = Description of Artificial Sequence: Synthetic peptide
  REGION 1..17: note = BAP058-03 vhCDR2
RIDPNSGSTKYNEKFKN

SEQ ID NO: 300 - protein, 11 aa, synthetic construct
  REGION 1..11: note = Description of Artificial Sequence: Synthetic peptide
  REGION 1..11: note = BAP058-03 vhCDR3
DYRKGLYAMDY

SEQ ID NO: 301 - protein, 107 aa, synthetic construct
  REGION 1..107: note = Description of Artificial Sequence: Synthetic polypeptide
  REGION 1..107: note = BAP058-03 Variable light (vl) domain
EIVLTQSPDFQSVTPKEKVTITCKASQDVGTAVAWYLQKPGQSPQLLIYWASTRHTGVPDRFSGSGSGTDFTLKISRVEAEDVGVYYCQQYNSYPLTFGQGTKVEIK

SEQ ID NO: 302 - protein, 11 aa, synthetic construct
  REGION 1..11: note = Description of Artificial Sequence: Synthetic peptide
  REGION 1..11: note = BAP058-03 vlCDR1
KASQDVGTAVA

SEQ ID NO: 303 - protein, 7 aa, synthetic construct
  REGION 1..7: note = Description of Artificial Sequence: Synthetic peptide
  REGION 1..7: note = BAP058-03 vlCDR2
WASTRHT

SEQ ID NO: 304 - protein, 9 aa, synthetic construct
  REGION 1..9: note = Description of Artificial Sequence: Synthetic peptide
  REGION 1..9: note = BAP058-03 vlCDR3
QQYNSYPLT

SEQ ID NO: 305 - protein, 120 aa, synthetic construct
  REGION 1..120: note = Description of Artificial Sequence: Synthetic polypeptide
  REGION 1..120: note = BAP058-04 Variable heavy (vh) domain
EVQLVQSGAEVKKPGESLRISCKGSGYTFTSYWMYWVRQAPGQGLEWMGRIDPNSGSTKYNEKFKNRVTISVDTSKNQFSLKLSSVTAADTAVYYCARDYRKGLYAMDYWGQGTTVTVSS

SEQ ID NO: 306 - protein, 5 aa, synthetic construct
  REGION 1..5: note = Description of Artificial Sequence: Synthetic peptide
  REGION 1..5: note = BAP058-04 vhCDR1
SYWMY

SEQ ID NO: 307 - protein, 17 aa, synthetic construct
  REGION 1..17: note = Description of Artificial Sequence: Synthetic peptide
  REGION 1..17: note = BAP058-04 vhCDR2
RIDPNSGSTKYNEKFKN

SEQ ID NO: 308 - protein, 11 aa, synthetic construct
  REGION 1..11: note = Description of Artificial Sequence: Synthetic peptide
  REGION 1..11: note = BAP058-04 vhCDR3
DYRKGLYAMDY

SEQ ID NO: 309 - protein, 107 aa, synthetic construct
  REGION 1..107: note = Description of Artificial Sequence: Synthetic polypeptide
  REGION 1..107: note = BAP058-04 Variable light (vl) domain
EIVLTQSPDFQSVTPKEKVTITCKASQDVGTAVAWYLQKPGQSPQLLIYWASTRHTGVPSRFSGSGSGTDFTFTISSLQPEDIATYYCQQYNSYPLTFGQGTKVEIK

SEQ ID NO: 310 - protein, 11 aa, synthetic construct
  REGION 1..11: note = Description of Artificial Sequence: Synthetic peptide
  REGION 1..11: note = BAP058-04 vlCDR1
KASQDVGTAVA

SEQ ID NO: 311 - protein, 7 aa, synthetic construct
  REGION 1..7: note = Description of Artificial Sequence: Synthetic peptide
  REGION 1..7: note = BAP058-04 vlCDR2
WASTRHT

SEQ ID NO: 312 - protein, 9 aa, synthetic construct
  REGION 1..9: note = Description of Artificial Sequence: Synthetic peptide
  REGION 1..9: note = BAP058-04 vlCDR3
QQYNSYPLT

SEQ ID NO: 313 - protein, 120 aa, synthetic construct
  REGION 1..120: note = Description of Artificial Sequence: Synthetic polypeptide
  REGION 1..120: note = BAP058-06 Variable heavy (vh) domain
EVQLVQSGAEVKKPGESLRISCKGSGYTFTSYWMYWIRQPPGKGLEWIGRIDPNSGSTKYNEKFKNRVTITADKSTSTAYMELSSLRSEDTAVYYCARDYRKGLYAMDYWGQGTTVTVSS

SEQ ID NO: 314 - protein, 5 aa, synthetic construct
  REGION 1..5: note = Description of Artificial Sequence: Synthetic peptide
  REGION 1..5: note = BAP058-06 vhCDR1
SYWMY

SEQ ID NO: 315 - protein, 17 aa, synthetic construct
  REGION 1..17: note = Description of Artificial Sequence: Synthetic peptide
  REGION 1..17: note = BAP058-06 vhCDR2
RIDPNSGSTKYNEKFKN

SEQ ID NO: 316 - protein, 11 aa, synthetic construct
  REGION 1..11: note = Description of Artificial Sequence: Synthetic peptide
  REGION 1..11: note = BAP058-06 vhCDR3
DYRKGLYAMDY

SEQ ID NO: 317 - protein, 107 aa, synthetic construct; identical to SEQ ID NO: 309
  REGION 1..107: note = Description of Artificial Sequence: Synthetic polypeptide
  REGION 1..107: note = BAP058-06 Variable light (vl) domain

SEQ ID NO: 318 - protein, 11 aa, synthetic construct
  REGION 1..11: note = Description of Artificial Sequence: Synthetic peptide
  REGION 1..11: note = BAP058-06 vlCDR1
KASQDVGTAVA

SEQ ID NO: 319 - protein, 7 aa, synthetic construct
  REGION 1..7: note = Description of Artificial Sequence: Synthetic peptide
  REGION 1..7: note = BAP058-06 vlCDR2
WASTRHT

SEQ ID NO: 320 - protein, 9 aa, synthetic construct
  REGION 1..9: note = Description of Artificial Sequence: Synthetic peptide
  REGION 1..9: note = BAP058-06 vlCDR3
QQYNSYPLT

SEQ ID NO: 321 - protein, 120 aa, synthetic construct
  REGION 1..120: note = Description of Artificial Sequence: Synthetic polypeptide
  REGION 1..120: note = BAP058-07 Variable heavy (vh) domain
QVQLVQSGAEVKKPGASVKVSCKASGYTFTSYWMYWIRQSPSRGLEWLGRIDPNSGSTKYNEKFKNRFTISRDDSKNTAYLQMNSLKTEDTAVYYCARDYRKGLYAMDYWGQGTTVTVSS

SEQ ID NO: 322 - protein, 5 aa, synthetic construct
  REGION 1..5: note = Description of Artificial Sequence: Synthetic peptide
  REGION 1..5: note = BAP058-07 vhCDR1
SYWMY

SEQ ID NO: 323 - protein, 17 aa, synthetic construct
  REGION 1..17: note = Description of Artificial Sequence: Synthetic peptide
  REGION 1..17: note = BAP058-07 vhCDR2
RIDPNSGSTKYNEKFKN

SEQ ID NO: 324 - protein, 11 aa, synthetic construct
  REGION 1..11: note = Description of Artificial Sequence: Synthetic peptide
  REGION 1..11: note = BAP058-07 vhCDR3
DYRKGLYAMDY

SEQ ID NO: 325 - protein, 107 aa, synthetic construct
  REGION 1..107: note = Description of Artificial Sequence: Synthetic polypeptide
  REGION 1..107: note = BAP058-07 Variable light (vl) domain
EIVLTQSPATLSLSPGERATLSCKASQDVGTAVAWYLQKPGQSPQLLIYWASTRHTGIPPRFSGSGYGTDFTLTINNIESEDAAYYFCQQYNSYPLTFGQGTKVEIK

SEQ ID NO: 326 - protein, 11 aa, synthetic construct
  REGION 1..11: note = Description of Artificial Sequence: Synthetic peptide
  REGION 1..11: note = BAP058-07 vlCDR1
KASQDVGTAVA

SEQ ID NO: 327 - protein, 7 aa, synthetic construct
  REGION 1..7: note = Description of Artificial Sequence: Synthetic peptide
  REGION 1..7: note = BAP058-07 vlCDR2
WASTRHT

SEQ ID NO: 328 - protein, 9 aa, synthetic construct
  REGION 1..9: note = Description of Artificial Sequence: Synthetic peptide
  REGION 1..9: note = BAP058-07 vlCDR3
QQYNSYPLT

SEQ ID NO: 329 - protein, 120 aa, synthetic construct; identical to SEQ ID NO: 297
  REGION 1..120: note = Description of Artificial Sequence: Synthetic polypeptide
  REGION 1..120: note = BAP058-11 Variable heavy (vh) domain

SEQ ID NO: 330 - protein, 5 aa, synthetic construct
  REGION 1..5: note = Description of Artificial Sequence: Synthetic peptide
  REGION 1..5: note = BAP058-11 vhCDR1
SYWMY

SEQ ID NO: 331 - protein, 17 aa, synthetic construct
  REGION 1..17: note = Description of Artificial Sequence: Synthetic peptide
  REGION 1..17: note = BAP058-11 vhCDR2
RIDPNSGSTKYNEKFKN

SEQ ID NO: 332 - protein, 11 aa, synthetic construct
  REGION 1..11: note = Description of Artificial Sequence: Synthetic peptide
  REGION 1..11: note = BAP058-11 vhCDR3
DYRKGLYAMDY

SEQ ID NO: 333 - protein, 107 aa, synthetic construct
  REGION 1..107: note = Description of Artificial Sequence: Synthetic polypeptide
  REGION 1..107: note = BAP058-11 Variable light (vl) domain
DVVMTQSPLSLPVTLGQPASISCKASQDVGTAVAWYQQKPGQAPRLLIYWASTRHTGVPSRFSGSGSGTEFTLTISSLQPDDFATYYCQQYNSYPLTFGQGTKVEIK

SEQ ID NO: 334 - protein, 11 aa, synthetic construct
  REGION 1..11: note = Description of Artificial Sequence: Synthetic peptide
  REGION 1..11: note = BAP058-11 vlCDR1
KASQDVGTAVA

SEQ ID NO: 335 - protein, 7 aa, synthetic construct
  REGION 1..7: note = Description of Artificial Sequence: Synthetic peptide
  REGION 1..7: note = BAP058-11 vlCDR2
WASTRHT

SEQ ID NO: 336 - protein, 9 aa, synthetic construct
  REGION 1..9: note = Description of Artificial Sequence: Synthetic peptide
  REGION 1..9: note = BAP058-11 vlCDR3
QQYNSYPLT

SEQ ID NO: 337 - protein, 120 aa, synthetic construct
  REGION 1..120: note = Description of Artificial Sequence: Synthetic polypeptide
  REGION 1..120: note = BAP058-13 Variable heavy (vh) domain
EVQLVQSGAEVKKPGATVKISCKVSGYTFTSYWMYWVRQARGQRLEWIGRIDPNSGSTKYNEKFKNRFTISRDNSKNTLYLQMNSLRAEDTAVYYCARDYRKGLYAMDYWGQGTTVTVSS

SEQ ID NO: 338 - protein, 5 aa, synthetic construct
  REGION 1..5: note = Description of Artificial Sequence: Synthetic peptide
  REGION 1..5: note = BAP058-13 vhCDR1
SYWMY

SEQ ID NO: 339 - protein, 17 aa, synthetic construct
  REGION 1..17: note = Description of Artificial Sequence: Synthetic peptide
  REGION 1..17: note = BAP058-13 vhCDR2
RIDPNSGSTKYNEKFKN

SEQ ID NO: 340 - protein, 11 aa, synthetic construct
  REGION 1..11: note = Description of Artificial Sequence: Synthetic peptide
  REGION 1..11: note = BAP058-13 vhCDR3
DYRKGLYAMDY

SEQ ID NO: 341 - protein, 107 aa, synthetic construct
  REGION 1..107: note = Description of Artificial Sequence: Synthetic polypeptide
  REGION 1..107: note = BAP058-13 Variable light (vl) domain
AIQLTQSPSSLSASVGDRVTITCKASQDVGTAVAWYLQKPGQSPQLLIYWASTRHTGVPSRFSGSGSGTDFTFTISSLEAEDAATYYCQQYNSYPLTFGQGTKVEIK

SEQ ID NO: 342 - protein, 11 aa, synthetic construct
  REGION 1..11: note = Description of Artificial Sequence: Synthetic peptide
  REGION 1..11: note = BAP058-13 vlCDR1
KASQDVGTAVA

SEQ ID NO: 343 - protein, 7 aa, synthetic construct
  REGION 1..7: note = Description of Artificial Sequence: Synthetic peptide
  REGION 1..7: note = BAP058-13 vlCDR2
WASTRHT

SEQ ID NO: 344 - protein, 9 aa, synthetic construct
  REGION 1..9: note = Description of Artificial Sequence: Synthetic peptide
  REGION 1..9: note = BAP058-13 vlCDR3
QQYNSYPLT

SEQ ID NO: 345 - protein, 121 aa, synthetic construct
  REGION 1..121: note = Description of Artificial Sequence: Synthetic polypeptide
  REGION 1..121: note = H6 Variable heavy (vh) domain
QMQLVQSGAEVKKPGSSVKVSCKASGGTFSSYAISWVRQAPGQGLEWMGGIIPIFGTANYAQKFQGRVTITADESTSTAYMELSSLRSEDTAVYYCARGNIVATITPLDYWGQGTLVTVSS

SEQ ID NO: 346 - protein, 5 aa, synthetic construct
  REGION 1..5: note = Description of Artificial Sequence: Synthetic peptide
  REGION 1..5: note = H6 vhCDR1
SYAIS

SEQ ID NO: 347 - protein, 17 aa, synthetic construct
  REGION 1..17: note = Description of Artificial Sequence: Synthetic peptide
  REGION 1..17: note = H6 vhCDR2
GIIPIFGTANYAQKFQG

SEQ ID NO: 348 - protein, 12 aa, synthetic construct
  REGION 1..12: note = Description of Artificial Sequence: Synthetic peptide
  REGION 1..12: note = H6 vhCDR3
GNIVATITPLDY

SEQ ID NO: 349 - protein, 108 aa, synthetic construct
  REGION 1..108: note = Description of Artificial Sequence: Synthetic polypeptide
  REGION 1..108: note = H6 Variable light (vl) domain
SYELMQPPSVSVAPGKTATIACGGENIGRKTVHWYQQKPGQAPVLVIYYDSDRPSGIPERFSGSNSGNTATLTISRVEAGDEADYYCQVWDSSSDHRIFGGGTKLTVL

SEQ ID NO: 350 - protein, 11 aa, synthetic construct
  REGION 1..11: note = Description of Artificial Sequence: Synthetic peptide
  REGION 1..11: note = H6 vlCDR1
GGENIGRKTVH

SEQ ID NO: 351 - protein, 7 aa, synthetic construct
  REGION 1..7: note = Description of Artificial Sequence: Synthetic peptide
  REGION 1..7: note = H6 vlCDR2
YDSDRPS

SEQ ID NO: 352 - protein, 11 aa, synthetic construct
  REGION 1..11: note = Description of Artificial Sequence: Synthetic peptide
  REGION 1..11: note = H6 vlCDR3
QVWDSSSDHRI

SEQ ID NO: 353 - protein, 121 aa, synthetic construct
  REGION 1..121: note = Description of Artificial Sequence: Synthetic polypeptide
  REGION 1..121: note = RC5 Variable heavy (vh) domain
EVQLLESGGGVVQPGGSLRLSCAASGFTFSSYWMSWVRQAPGKGLEWVANIKQDGSEKYYVDSVKGRFTISRDNSKNTVSLQMNSLRAEDTAVYYCAKDRYYNFPLGMDVWGQGTTVTVSS

SEQ ID NO: 354 - protein, 5 aa, synthetic construct
  REGION 1..5: note = Description of Artificial Sequence: Synthetic peptide
  REGION 1..5: note = RC5 vhCDR1
SYWMS

SEQ ID NO: 355 - protein, 17 aa, synthetic construct
  REGION 1..17: note = Description of Artificial Sequence: Synthetic peptide
  REGION 1..17: note = RC5 vhCDR2
NIKQDGSEKYYVDSVKG

SEQ ID NO: 356 - protein, 12 aa, synthetic construct
  REGION 1..12: note = Description of Artificial Sequence: Synthetic peptide
  REGION 1..12: note = RC5 vhCDR3
DRYYNFPLGMDV

SEQ ID NO: 357 - protein, 107 aa, synthetic construct
  REGION 1..107: note = Description of Artificial Sequence: Synthetic polypeptide
  REGION 1..107: note = RC5 Variable light (vl) domain
AIRMTQSPSSLSASVGDRVTITCRASQSISSYLNWYQQKPGKAPKLLIYTTSSLKSGVPSRFSGSGSGTDFTLTISRLQPEDFATYYCQQSYSSTWTFGRGTKVEIK

SEQ ID NO: 358 - protein, 11 aa, synthetic construct
  REGION 1..11: note = Description of Artificial Sequence: Synthetic peptide
  REGION 1..11: note = RC5 vlCDR1
RASQSISSYLN

SEQ ID NO: 359 - protein, 7 aa, synthetic construct
  REGION 1..7: note = Description of Artificial Sequence: Synthetic peptide
  REGION 1..7: note = RC5 vlCDR2
TTSSLKS

SEQ ID NO: 360 - protein, 9 aa, synthetic construct
  REGION 1..9: note = Description of Artificial Sequence: Synthetic peptide
  REGION 1..9: note = RC5 vlCDR3
QQSYSSTWT

SEQ ID NO: 361 - protein, 123 aa, synthetic construct
  REGION 1..123: note = Description of Artificial Sequence: Synthetic polypeptide
  REGION 1..123: note = SH1A1Q Variable heavy (vh) domain
EVQLVQSGAEVKKPGSSVKVSCKASGGTFSSYAISWVRQAPGQGLEWMGGIIPIFGTANYAQKFQGRVTITADKSTSTAYMELSSLRSEDTAVYYCAREGTIYDSSGYSFDYWGQGTLVTVSS

SEQ ID NO: 362 - protein, 5 aa, synthetic construct
  REGION 1..5: note = Description of Artificial Sequence: Synthetic peptide
  REGION 1..5: note = SH1A1Q vhCDR1
SYAIS

SEQ ID NO: 363 - protein, 17 aa, synthetic construct
  REGION 1..17: note = Description of Artificial Sequence: Synthetic peptide
  REGION 1..17: note = SH1A1Q vhCDR2
GIIPIFGTANYAQKFQG

SEQ ID NO: 364 - protein, 14 aa, synthetic construct
  REGION 1..14: note = Description of Artificial Sequence: Synthetic peptide
  REGION 1..14: note = SH1A1Q vhCDR3
EGTIYDSSGYSFDY

SEQ ID NO: 365 - protein, 110 aa, synthetic construct
  REGION 1..110: note = Description of Artificial Sequence: Synthetic polypeptide
  REGION 1..110: note = SH1A1Q Variable light (vl) domain
QSVLTQPPSVSAAPGQKVTISCSGNNSNIANNYVSWYQQLPGTAPKLLIYDNNYRPSGIPDRFSGSKSGTSATLDITGLQTGDEADYYCGVWDGSLTTGVFGGGTKLTVL

SEQ ID NO: 366 - protein, 13 aa, synthetic construct
  REGION 1..13: note = Description of Artificial Sequence: Synthetic peptide
  REGION 1..13: note = SH1A1Q vlCDR1
SGNNSNIANNYVS

SEQ ID NO: 367 - protein, 7 aa, synthetic construct
  REGION 1..7: note = Description of Artificial Sequence: Synthetic peptide
  REGION 1..7: note = SH1A1Q vlCDR2
DNNYRPS

SEQ ID NO: 368 - protein, 11 aa, synthetic construct
  REGION 1..11: note = Description of Artificial Sequence: Synthetic peptide
  REGION 1..11: note = SH1A1Q vlCDR3
GVWDGSLTTGV

SEQ ID NO: 369 - protein, 118 aa, synthetic construct
  REGION 1..118: note = Description of Artificial Sequence: Synthetic polypeptide
  REGION 1..118: note = SH1B3 Variable heavy (vh) domain
QVQLVESGGGVVQPGRSLRLSCAASGFTFSSYAMHWVRQAPGKGLEWVAVISFDGSNKYYADSVRGRFTISRDNSKNTLYLQMNSLRTEDTAVYYCARGWLDRDIDYWGQGTLVTVSS

SEQ ID NO: 370 - protein, 5 aa, synthetic construct
  REGION 1..5: note = Description of Artificial Sequence: Synthetic peptide
  REGION 1..5: note = SH1B3 vhCDR1
SYAMH

SEQ ID NO: 371 - protein, 17 aa, synthetic construct
  REGION 1..17: note = Description of Artificial Sequence: Synthetic peptide
  REGION 1..17: note = SH1B3 vhCDR2
VISFDGSNKYYADSVRG

SEQ ID NO: 372 - protein, 9 aa, synthetic construct
  REGION 1..9: note = Description of Artificial Sequence: Synthetic peptide
  REGION 1..9: note = SH1B3 vhCDR3
GWLDRDIDY

SEQ ID NO: 373 - protein, 110 aa, synthetic construct
  REGION 1..110: note = Description of Artificial Sequence: Synthetic polypeptide
  REGION 1..110: note = SH1B3 Variable light (vl) domain
LPVLTQPASVSGSPGQSITISCTGTTSDIGGYDYVSWYQQHPGKAPKLMIYDVSKRPSGVSNRFSGSKSGNTASLTISGLQAEDEADYYCSSYTSSSTHVFGTGTKLTVL

SEQ ID NO: 374 - protein, 14 aa, synthetic construct
  REGION 1..14: note = Description of Artificial Sequence: Synthetic peptide
  REGION 1..14: note = SH1B3 vlCDR1
TGTTSDIGGYDYVS

SEQ ID NO: 375 - protein, 7 aa, synthetic construct
  REGION 1..7: note = Description of Artificial Sequence: Synthetic peptide
  REGION 1..7: note = SH1B3 vlCDR2
DVSKRPS

SEQ ID NO: 376 - protein, 10 aa, synthetic construct
  REGION 1..10: note = Description of Artificial Sequence: Synthetic peptide
  REGION 1..10: note = SH1B3 vlCDR3
SSYTSSSTHV

SEQ ID NO: 377 - protein, 118 aa, synthetic construct
  REGION 1..118: note = Description of Artificial Sequence: Synthetic polypeptide
  REGION 1..118: note = SH1D1 Variable heavy (vh) domain
EVQLVESGGGVVQPGRSLRLSCAASGFTFSSYAMHWVRQAPGKGLEWVAVISFDGSNKYYADSVRGRFTISRDNSKNTLYLQMNSLRTEDTAVYYCARGWLDRDIDYWGQGTLVTVSS

SEQ ID NO: 378 - protein, 5 aa, synthetic construct
  REGION 1..5: note = Description of Artificial Sequence: Synthetic peptide
  REGION 1..5: note = SH1D1 vhCDR1
SYAMH

SEQ ID NO: 379 - protein, 17 aa, synthetic construct
  REGION 1..17: note = Description of Artificial Sequence: Synthetic peptide
  REGION 1..17: note = SH1D1 vhCDR2
VISFDGSNKYYADSVRG

SEQ ID NO: 380 - protein, 9 aa, synthetic construct
  REGION 1..9: note = Description of Artificial Sequence: Synthetic peptide
  REGION 1..9: note = SH1D1 vhCDR3
GWLDRDIDY

SEQ ID NO: 381 - protein, 111 aa, synthetic construct
  REGION 1..111: note = Description of Artificial Sequence: Synthetic polypeptide
  REGION 1..111: note = SH1D1 Variable light (vl) domain
QSALTQPASVSGSPGQSITISCTGTSSDVGGYNYVSWYQQHPGKAPKLMIYDVSNRPSGVSNRFSGSKSGNTASLTISGLQAEDEADYYCSSYRSSTLGPVFGGGTKLTVL

SEQ ID NO: 382 - protein, 14 aa, synthetic construct
  REGION 1..14: note = Description of Artificial Sequence: Synthetic peptide
  REGION 1..14: note = SH1D1 vlCDR1
TGTSSDVGGYNYVS

SEQ ID NO: 383 - protein, 7 aa, synthetic construct
  REGION 1..7: note = Description of Artificial Sequence: Synthetic peptide
  REGION 1..7: note = SH1D1 vlCDR2
DVSNRPS

SEQ ID NO: 384 - protein, 11 aa, synthetic construct
  REGION 1..11: note = Description of Artificial Sequence: Synthetic peptide
  REGION 1..11: note = SH1D1 vlCDR3
SSYRSSTLGPV

SEQ ID NO: 385 - protein, 118 aa, synthetic construct; identical to SEQ ID NO: 369
  REGION 1..118: note = Description of Artificial Sequence: Synthetic polypeptide
  REGION 1..118: note = SH1D2 Variable heavy (vh) domain

SEQ ID NO: 386 - protein, 5 aa, synthetic construct
  REGION 1..5: note = Description of Artificial Sequence: Synthetic peptide
  REGION 1..5: note = SH1D2 vhCDR1
SYAMH

SEQ ID NO: 387 - protein, 17 aa, synthetic construct
  REGION 1..17: note = Description of Artificial Sequence: Synthetic peptide
  REGION 1..17: note = SH1D2 vhCDR2
VISFDGSNKYYADSVRG

SEQ ID NO: 388 - protein, 9 aa, synthetic construct
  REGION 1..9: note = Description of Artificial Sequence: Synthetic peptide
  REGION 1..9: note = SH1D2 vhCDR3
GWLDRDIDY

SEQ ID NO: 389 - protein, 110 aa, synthetic construct
  REGION 1..110: note = Description of Artificial Sequence: Synthetic polypeptide
  REGION 1..110: note = SH1D2 Variable light (vl) domain
QAGLTQPPSVSEAPRQRVTISCSGSSSNIGNNAVNWYQQLPGKAPKLLIYYDDLLPSGVSDRFSGSKSGTSASLAISGLQSEDEADYYCAAWDDSLNGYVFGTGTKLTVL

SEQ ID NO: 390 - protein, 13 aa, synthetic construct
  REGION 1..13: note = Description of Artificial Sequence: Synthetic peptide
  REGION 1..13: note = SH1D2 vlCDR1
SGSSSNIGNNAVN

SEQ ID NO: 391 - protein, 7 aa, synthetic construct
  REGION 1..7: note = Description of Artificial Sequence: Synthetic peptide
  REGION 1..7: note = SH1D2 vlCDR2
YDDLLPS

SEQ ID NO: 392 - protein, 11 aa, synthetic construct
  REGION 1..11: note = Description of Artificial Sequence: Synthetic peptide
  REGION 1..11: note = SH1D2 vlCDR3
AAWDDSLNGYV

SEQ ID NO: 393 - protein, 118 aa, synthetic construct; identical to SEQ ID NO: 377
  REGION 1..118: note = Description of Artificial Sequence: Synthetic polypeptide
  REGION 1..118: note = SH1D12 Variable heavy (vh) domain

SEQ ID NO: 394 - protein, 5 aa, synthetic construct
  REGION 1..5: note = Description of Artificial Sequence: Synthetic peptide
  REGION 1..5: note = SH1D12 vhCDR1
SYAMH

SEQ ID NO: 395 - protein, 17 aa, synthetic construct
  REGION 1..17: note = Description of Artificial Sequence: Synthetic peptide
  REGION 1..17: note = SH1D12 vhCDR2
VISFDGSNKYYADSVRG

SEQ ID NO: 396 - protein, 9 aa, synthetic construct
  REGION 1..9: note = Description of Artificial Sequence: Synthetic peptide
  REGION 1..9: note = SH1D12 vhCDR3
GWLDRDIDY

SEQ ID NO: 397 - protein, 110 aa, synthetic construct
  REGION 1..110: note = Description of Artificial Sequence: Synthetic polypeptide
  REGION 1..110: note = SH1D12 Variable light (vl) domain
QSALTQPRSVSGSPGQSVTISCTGTSSDVGGYNYVSWYQQHPGKAPKLMIYDVSKRPSGVPDRFSGSKSGNTASLTISGLQAEDEADYYCSSYTSSTTHVFGTGTKVTVL

SEQ ID NO: 398 - protein, 14 aa, synthetic construct
  REGION 1..14: note = Description of Artificial Sequence: Synthetic peptide
  REGION 1..14: note = SH1D12 vlCDR1
TGTSSDVGGYNYVS

SEQ ID NO: 399 - protein, 7 aa, synthetic construct
  REGION 1..7: note = Description of Artificial Sequence: Synthetic peptide
  REGION 1..7: note = SH1D12 vlCDR2
DVSKRPS

SEQ ID NO: 400 - protein, 10 aa, synthetic construct
  REGION 1..10: note = Description of Artificial Sequence: Synthetic peptide
  REGION 1..10: note = SH1D12 vlCDR3
SSYTSSTTHV

SEQ ID NO: 401 - protein, 118 aa, synthetic construct; identical to SEQ ID NO: 377
  REGION 1..118: note = Description of Artificial Sequence: Synthetic polypeptide
  REGION 1..118: note = SH1E1 Variable heavy (vh) domain

SEQ ID NO: 402 - protein, 5 aa, synthetic construct
  REGION 1..5: note = Description of Artificial Sequence: Synthetic peptide
  REGION 1..5: note = SH1E1 vhCDR1
SYAMH

SEQ ID NO: 403 - protein, 17 aa, synthetic construct
  REGION 1..17: note = Description of Artificial Sequence: Synthetic peptide
  REGION 1..17: note = SH1E1 vhCDR2
VISFDGSNKYYADSVRG

SEQ ID NO: 404 - protein, 9 aa, synthetic construct
  REGION 1..9: note = Description of Artificial Sequence: Synthetic peptide
  REGION 1..9: note = SH1E1 vhCDR3
GWLDRDIDY

SEQ ID NO: 405 - protein, 110 aa, synthetic construct
  REGION 1..110: note = Description of Artificial Sequence: Synthetic polypeptide
  REGION 1..110: note = SH1E1 Variable light (vl) domain
QSVVTQPPSVSAAPGQKVTISCSGSSSNIGNNYVSWYQQLPGTAPKLLIYDNNKRPSGIPDRFSGSKSGTSATLGITGLQTGDEADYYCGTWDSSLSVWVFGGGTQLTVL

SEQ ID NO: 406 - protein, 13 aa, synthetic construct
  REGION 1..13: note = Description of Artificial Sequence: Synthetic peptide
  REGION 1..13: note = SH1E1 vlCDR1
SGSSSNIGNNYVS

SEQ ID NO: 407 - protein, 7 aa, synthetic construct
  REGION 1..7: note = Description of Artificial Sequence: Synthetic peptide
  REGION 1..7: note = SH1E1 vlCDR2
DNNKRPS

SEQ ID NO: 408 - protein, 11 aa, synthetic construct
  REGION 1..11: note = Description of Artificial Sequence: Synthetic peptide
  REGION 1..11: note = SH1E1 vlCDR3
GTWDSSLSVWV

SEQ ID NO: 409 - protein, 118 aa, synthetic construct; identical to SEQ ID NO: 369
  REGION 1..118: note = Description of Artificial Sequence: Synthetic polypeptide
  REGION 1..118: note = SH1G9 Variable heavy (vh) domain

SEQ ID NO: 410 - protein, 5 aa, synthetic construct
  REGION 1..5: note = Description of Artificial Sequence: Synthetic peptide
  REGION 1..5: note = SH1G9 vhCDR1
SYAMH

SEQ ID NO: 411 - protein, 17 aa, synthetic construct
  REGION 1..17: note = Description of Artificial Sequence: Synthetic peptide
  REGION 1..17: note = SH1G9 vhCDR2
VISFDGSNKYYADSVRG

SEQ ID NO: 412 - protein, 9 aa, synthetic construct
  REGION 1..9: note = Description of Artificial Sequence: Synthetic peptide
  REGION 1..9: note = SH1G9 vhCDR3
GWLDRDIDY

SEQ ID NO: 413 - protein, 112 aa, synthetic construct
  REGION 1..112: note = Description of Artificial Sequence: Synthetic polypeptide
  REGION 1..112: note = SH1G9 Variable light (vl) domain
QSVLTQPASVSGSPGQSITISCTGTSSDVGGYNYVSWYQQHPGRAPRLMIYDVSNRPSGVSNRFSGSKSGNTASLTISGLQAEDEGDYYCSSYTSGGTLGPVFGGGTKLTVL

SEQ ID NO: 414 - protein, 14 aa, synthetic construct
  REGION 1..14: note = Description of Artificial Sequence: Synthetic peptide
  REGION 1..14: note = SH1G9 vlCDR1
TGTSSDVGGYNYVS

SEQ ID NO: 415 - protein, 7 aa, synthetic construct
  REGION 1..7: note = Description of Artificial Sequence: Synthetic peptide
  REGION 1..7: note = SH1G9 vlCDR2
DVSNRPS

SEQ ID NO: 416 - protein, 12 aa, synthetic construct
  REGION 1..12: note = Description of Artificial Sequence: Synthetic peptide
  REGION 1..12: note = SH1G9 vlCDR3
SSYTSGGTLGPV

SEQ ID NO: 417 - protein, 120 aa, synthetic construct
  REGION 1..120: note = Description of Artificial Sequence: Synthetic polypeptide
  REGION 1..120: note = SH1E6 Variable heavy (vh) domain
QVQLVQSGAEVKKPGSSVKVSCKASGGTFSRYGVHWVRQAPGQGLEWMGRLIPIVSMTNYAQKFQDRVSITTDKSTGTAYMELRSLTSEDTALYYCASVGQQLPWVFFAWGQGTLVTVSS

SEQ ID NO: 418 - protein, 5 aa, synthetic construct
  REGION 1..5: note = Description of Artificial Sequence: Synthetic peptide
  REGION 1..5: note = SH1E6 vhCDR1
RYGVH

SEQ ID NO: 419 - protein, 17 aa, synthetic construct
  REGION 1..17: note = Description of Artificial Sequence: Synthetic peptide
  REGION 1..17: note = SH1E6 vhCDR2
RLIPIVSMTNYAQKFQD

SEQ ID NO: 420 - protein, 11 aa, synthetic construct
  REGION 1..11: note = Description of Artificial Sequence: Synthetic peptide
  REGION 1..11: note = SH1E6 vhCDR3
VGQQLPWVFFA

SEQ ID NO: 421 - protein, 110 aa, synthetic construct
  REGION 1..110: note = Description of Artificial Sequence: Synthetic polypeptide
  REGION 1..110: note = SH1E6 Variable light (vl) domain
QSVVTQPPSVSAAPGQKVTISCSGSSSNIGNNYVSWYQQLPGTAPKLLIYDNNKRPSGIPDRFSGSKSGTSATLGITGLQTGDEADYYCGTWDSSLSAVVFGGGTKLTVL

SEQ ID NO: 422 - protein, 13 aa, synthetic construct
  REGION 1..13: note = Description of Artificial Sequence: Synthetic peptide
  REGION 1..13: note = SH1E6 vlCDR1
SGSSSNIGNNYVS

SEQ ID NO: 423 - protein, 7 aa, synthetic construct
  REGION 1..7: note = Description of Artificial Sequence: Synthetic peptide
  REGION 1..7: note = SH1E6 vlCDR2
DNNKRPS

SEQ ID NO: 424 - protein, 11 aa, synthetic construct
  REGION 1..11: note = Description of Artificial Sequence: Synthetic peptide
  REGION 1..11: note = SH1E6 vlCDR3
GTWDSSLSAVV

SEQ ID NO: 425 - protein, 118 aa, synthetic construct
  REGION 1..118: note = Description of Artificial Sequence: Synthetic polypeptide
  REGION 1..118: note = SH1A2 Variable heavy (vh) domain
QMQLVQSGGGVVQPGRSLRLSCAASGFTFSSYAMHWVRQAPGKGLEWVAVISFDGSNKYYADSVRGRFTISRDNSKNTLYLQMNSLRTEDTAVYYCARGWLDRDIDYWGQGTLVTVSS

SEQ ID NO: 426 - protein, 5 aa, synthetic construct
  REGION 1..5: note = Description of Artificial Sequence: Synthetic peptide
  REGION 1..5: note = SH1A2 vhCDR1
SYAMH

SEQ ID NO: 427 - protein, 17 aa, synthetic construct
  REGION 1..17: note = Description of Artificial Sequence: Synthetic peptide
  REGION 1..17: note = SH1A2 vhCDR2
VISFDGSNKYYADSVRG

SEQ ID NO: 428 - protein, 9 aa, synthetic construct
  REGION 1..9: note = Description of Artificial Sequence: Synthetic peptide
  REGION 1..9: note = SH1A2 vhCDR3
GWLDRDIDY

SEQ ID NO: 429 - protein, 110 aa, synthetic construct
  REGION 1..110: note = Description of Artificial Sequence: Synthetic polypeptide
  REGION 1..110: note = SH1A2 Variable light (vl) domain
QSVVTQPPSVSAAPGQKVTISCSGSSSNIGNNYVSWYQQVPGTAPKLLIYDNNKRPSGIPDRFSGSNSDTSATLGITGLQTGDEADYYCGTWDSSLSAWVFGGGTKLTVL

SEQ ID NO: 430 - protein, 13 aa, synthetic construct
  REGION 1..13: note = Description of Artificial Sequence: Synthetic peptide
  REGION 1..13: note = SH1A2 vlCDR1
SGSSSNIGNNYVS

SEQ ID NO: 431 - protein, 7 aa, synthetic construct
  REGION 1..7: note = Description of Artificial Sequence: Synthetic peptide
  REGION 1..7: note = SH1A2 vlCDR2
DNNKRPS

SEQ ID NO: 432 - protein, 11 aa, synthetic construct
  REGION 1..11: note = Description of Artificial Sequence: Synthetic peptide
  REGION 1..11: note = SH1A2 vlCDR3
GTWDSSLSAWV

SEQ ID NO: 433 - protein, 118 aa, synthetic construct
  REGION 1..118: note = Description of Artificial Sequence: Synthetic polypeptide
  REGION 1..118: note = SH1B1 Variable heavy (vh) domain
QVQLVQSGGGVVQPGRSLRLSCAASGFTFSSYAMHWVRQAPGKGLEWVAVISFDGSNKYYADSVRGRFTISRDNSKNTLYLQMNSLRTEDTAVYYCARGWLDRDIDYWGQGTLVTVSS

SEQ ID NO: 434 - protein, 5 aa, synthetic construct
  REGION 1..5: note = Description of Artificial Sequence: Synthetic peptide
  REGION 1..5: note = SH1B1 vhCDR1
SYAMH

SEQ ID NO: 435 - protein, 17 aa, synthetic construct
  REGION 1..17: note = Description of Artificial Sequence: Synthetic peptide
  REGION 1..17: note = SH1B1 vhCDR2
VISFDGSNKYYADSVRG

SEQ ID NO: 436 - protein, 9 aa, synthetic construct
  REGION 1..9: note = Description of Artificial Sequence: Synthetic peptide
  REGION 1..9: note = SH1B1 vhCDR3
GWLDRDIDY

SEQ ID NO: 437 - protein, 112 aa, synthetic construct
  REGION 1..112: note = Description of Artificial Sequence: Synthetic polypeptide
  REGION 1..112: note = SH1B1 Variable light (vl) domain
QSVVTQPPSVSAAPGQKVTISCSGSSSNIGNNYVSWYQQLPGTAPKLLIYDNNKRPSGIPDRFSGSKSGTSATLGITGLQTGDEADYYCGTWDSSLSAGSVVFGGGTKLTVL

SEQ ID NO: 438 - protein, 13 aa, synthetic construct
  REGION 1..13: note = Description of Artificial Sequence: Synthetic peptide
  REGION 1..13: note = SH1B1 vlCDR1
SGSSSNIGNNYVS

SEQ ID NO: 439 - protein, 7 aa, synthetic construct
  REGION 1..7: note = Description of Artificial Sequence: Synthetic peptide
  REGION 1..7: note = SH1B1 vlCDR2
DNNKRPS

SEQ ID NO: 440 - protein, 13 aa, synthetic construct
  REGION 1..13: note = Description of Artificial Sequence: Synthetic peptide
  REGION 1..13: note = SH1B1 vlCDR3
GTWDSSLSAGSVV

SEQ ID NO: 441 - protein, 121 aa, synthetic construct
  REGION 1..121: note = Description of Artificial Sequence: Synthetic polypeptide
  REGION 1..121: note = H6B1L Variable heavy (vh) domain
QMQLVQSGAEVKKPGSSVKVSCKASGGTFSSYAYSWVRQAPGQGLEWMGGIIPSFGTANYAQKFQGRVTITADESTSTAYMELSSLRSEDTAVYYCARGPIVATITPLDYWGQGTLVTVSS

SEQ ID NO: 442 - protein, 5 aa, synthetic construct
  REGION 1..5: note = Description of Artificial Sequence: Synthetic peptide
  REGION 1..5: note = H6B1L vhCDR1
SYAYS

SEQ ID NO: 443 - protein, 17 aa, synthetic construct
  REGION 1..17: note = Description of Artificial Sequence: Synthetic peptide
  REGION 1..17: note = H6B1L vhCDR2
GIIPSFGTANYAQKFQG

SEQ ID NO: 444 - protein, 12 aa, synthetic construct
  REGION 1..12: note = Description of Artificial Sequence: Synthetic peptide
  REGION 1..12: note = H6B1L vhCDR3
GPIVATITPLDY

SEQ ID NO: 445 - protein, 108 aa, synthetic construct
  REGION 1..108: note = Description of Artificial Sequence: Synthetic polypeptide
  REGION 1..108: note = H6B1L Variable light (vl) domain
SYELMQPPSVSVAPGKTATIACGGENIGRKTVHWYQQKPGQAPVLVIYYDSDRPSGIPERFSGSNSGNTATLTISRVEAGDEADYYCLVWDSSSDHRIFGGGTKLTVL

SEQ ID NO: 446 - protein, 11 aa, synthetic construct
  REGION 1..11: note = Description of Artificial Sequence: Synthetic peptide
  REGION 1..11: note = H6B1L vlCDR1
GGENIGRKTVH

SEQ ID NO: 447 - protein, 7 aa, synthetic construct
  REGION 1..7: note = Description of Artificial Sequence: Synthetic peptide
  REGION 1..7: note = H6B1L vlCDR2
YDSDRPS

SEQ ID NO: 448 - protein, 11 aa, synthetic construct
  REGION 1..11: note = Description of Artificial Sequence: Synthetic peptide
  REGION 1..11: note = H6B1L vlCDR3
LVWDSSSDHRI

SEQ ID NO: 449 - protein, 121 aa, synthetic construct
  REGION 1..121: note = Description of Artificial Sequence: Synthetic polypeptide
  REGION 1..121: note = H6A1 Variable heavy (vh) domain
QMQLVQSGAEVKKPGSSVKVSCKASGGTFSSYAYSWVRQAPGQGLEWMGGIIPIFGTANYAQKFQGRVTITADESTSTAYMELSSLRSEDTAVYYCARGPIVATITPLDYWGQGTLVTVSS

SEQ ID NO: 450 - protein, 5 aa, synthetic construct
  REGION 1..5: note = Description of Artificial Sequence: Synthetic peptide
  REGION 1..5: note = H6A1 vhCDR1
SYAYS

SEQ ID NO: 451 - protein, 17 aa, synthetic construct
  REGION 1..17: note = Description of Artificial Sequence: Synthetic peptide
  REGION 1..17: note = H6A1 vhCDR2
GIIPIFGTANYAQKFQG

SEQ ID NO: 452 - protein, 12 aa, synthetic construct
  REGION 1..12: note = Description of Artificial Sequence: Synthetic peptide
  REGION 1..12: note = H6A1 vhCDR3
GPIVATITPLDY

SEQ ID NO: 453 - protein, 108 aa, synthetic construct; identical to SEQ ID NO: 349
  REGION 1..108: note = Description of Artificial Sequence: Synthetic polypeptide
  REGION 1..108: note = H6A1 Variable light (vl) domain

SEQ ID NO: 454 - protein, 11 aa, synthetic construct
  REGION 1..11: note = Description of Artificial Sequence: Synthetic peptide
  REGION 1..11: note = H6A1 vlCDR1
GGENIGRKTVH

SEQ ID NO: 455 - protein, 7 aa, synthetic construct
  REGION 1..7: note = Description of Artificial Sequence: Synthetic peptide
  REGION 1..7: note = H6A1 vlCDR2
YDSDRPS

SEQ ID NO: 456 - protein, 11 aa, synthetic construct
  REGION 1..11: note = Description of Artificial Sequence: Synthetic peptide
  REGION 1..11: note = H6A1 vlCDR3
QVWDSSSDHRI

SEQ ID NO: 457 - protein, 121 aa, synthetic construct; identical to SEQ ID NO: 441
  REGION 1..121: note = Description of Artificial Sequence: Synthetic polypeptide
  REGION 1..121: note = H6B1 Variable heavy (vh) domain

SEQ ID NO: 458 - protein, 5 aa, synthetic construct
  REGION 1..5: note = Description of Artificial Sequence: Synthetic peptide
  REGION 1..5: note = H6B1 vhCDR1
SYAYS

SEQ ID NO: 459 - protein, 17 aa, synthetic construct
  REGION 1..17: note = Description of Artificial Sequence: Synthetic peptide
  REGION 1..17: note = H6B1 vhCDR2
GIIPSFGTANYAQKFQG

SEQ ID NO: 460 - protein, 12 aa, synthetic construct
  REGION 1..12: note = Description of Artificial Sequence: Synthetic peptide
  REGION 1..12: note = H6B1 vhCDR3
GPIVATITPLDY

SEQ ID NO: 461 - protein, 108 aa, synthetic construct; identical to SEQ ID NO: 349
  REGION 1..108: note = Description of Artificial Sequence: Synthetic polypeptide
  REGION 1..108: note = H6B1 Variable light (vl) domain

SEQ ID NO: 462 - protein, 11 aa, synthetic construct
  REGION 1..11: note = Description of Artificial Sequence: Synthetic peptide
  REGION 1..11: note = H6B1 vlCDR1
GGENIGRKTVH

SEQ ID NO: 463 - protein, 7 aa, synthetic construct
  REGION 1..7: note = Description of Artificial Sequence: Synthetic peptide
  REGION 1..7: note = H6B1 vlCDR2
YDSDRPS

SEQ ID NO: 464 - protein, 11 aa, synthetic construct
  REGION 1..11: note = Description of Artificial Sequence: Synthetic peptide
  REGION 1..11: note = H6B1 vlCDR3
QVWDSSSDHRI

SEQ ID NO: 465 - protein, 121 aa, synthetic construct
  REGION 1..121: note = Description of Artificial Sequence: Synthetic polypeptide
  REGION 1..121: note = H6B2 Variable heavy (vh) domain
QMQLVQSGAEVKKPGSSVKVSCKASGGTFSSYAISWVRQAPGQGLEWMGGIIPAFGTANYAQKFQGRVTITADESTSTAYMELSSLRSEDTAVYYCARGPIVATITPLDYWGQGTLVTVSS

SEQ ID NO: 466 - protein, 5 aa, synthetic construct
  REGION 1..5: note = Description of Artificial Sequence: Synthetic peptide
  REGION 1..5: note = H6B2 vhCDR1
SYAIS

SEQ ID NO: 467 - protein, 17 aa, synthetic construct
  REGION 1..17: note = Description of Artificial Sequence: Synthetic peptide
  REGION 1..17: note = H6B2 vhCDR2
GIIPAFGTANYAQKFQG

SEQ ID NO: 468 - protein, 12 aa, synthetic construct
  REGION 1..12: note = Description of Artificial Sequence: Synthetic peptide
  REGION 1..12: note = H6B2 vhCDR3
GPIVATITPLDY

SEQ ID NO: 469 - protein, 108 aa, synthetic construct; identical to SEQ ID NO: 349
  REGION 1..108: note = Description of Artificial Sequence: Synthetic polypeptide
  REGION 1..108: note = H6B2 Variable light (vl) domain

SEQ ID NO: 470 - protein, 11 aa, synthetic construct
  REGION 1..11: note = Description of Artificial Sequence: Synthetic peptide
  REGION 1..11: note = H6B2 vlCDR1
GGENIGRKTVH

SEQ ID NO: 471 - protein, 7 aa, synthetic construct
  REGION 1..7: note = Description of Artificial Sequence: Synthetic peptide
  REGION 1..7: note = H6B2 vlCDR2
YDSDRPS

SEQ ID NO: 472 - protein, 11 aa, synthetic construct
  REGION 1..11: note = Description of Artificial Sequence: Synthetic peptide
  REGION 1..11: note = H6B2 vlCDR3
QVWDSSSDHRI

SEQ ID NO: 473 - protein, 118 aa, synthetic construct
  REGION 1..118: note = Description of Artificial Sequence: Synthetic polypeptide
  REGION 1..118: note = G12 Variable heavy (vh) domain
EVQLVQSGAEVKKPGASVKVSCKASGYTFTGYYMHWVRQAPGQGLEWMGWINPNSDNTGSAQKFQGRVFMTKTTSLNTAYMELSGLRSEDTAIYYCARERSSGYFDFWGQGTLVTVSS

SEQ ID NO: 474 - protein, 5 aa, synthetic construct
  REGION 1..5: note = Description of Artificial Sequence: Synthetic peptide
  REGION 1..5: note = G12 vhCDR1
GYYMH

SEQ ID NO: 475 - protein, 17 aa, synthetic construct
  REGION 1..17: note = Description of Artificial Sequence: Synthetic peptide
  REGION 1..17: note = G12 vhCDR2
WINPNSDNTGSAQKFQG

SEQ ID NO: 476 - protein, 9 aa, synthetic construct
  REGION 1..9: note = Description of Artificial Sequence: Synthetic peptide
  REGION 1..9: note = G12 vhCDR3
ERSSGYFDF

SEQ ID NO: 477 - protein, 107 aa, synthetic construct
  REGION 1..107: note = Description of Artificial Sequence: Synthetic polypeptide
  REGION 1..107: note = G12 Variable light (vl) domain
DIVMTQSPSSLSASVGDRVTITCRASQSISSYLNWYQQKPGKAPKLLIYAASSLQSGVPSRFSGSGSGTDFTLTISSLQPEDFATYYCQQSYSTPITFGQGTRLEIK

SEQ ID NO: 478 - protein, 11 aa, synthetic construct
  REGION 1..11: note = Description of Artificial Sequence: Synthetic peptide
  REGION 1..11: note = G12 vlCDR1
RASQSISSYLN

SEQ ID NO: 479 - protein, 7 aa, synthetic construct
  REGION 1..7: note = Description of Artificial Sequence: Synthetic peptide
  REGION 1..7: note = G12 vlCDR2
AASSLQS

SEQ ID NO: 480 - protein, 9 aa, synthetic construct
  REGION 1..9: note = Description of Artificial Sequence: Synthetic peptide
  REGION 1..9: note = G12 vlCDR3
QQSYSTPIT

SEQ ID NO: 481 - protein, 118 aa, synthetic construct
  REGION 1..118: note = Description of Artificial Sequence: Synthetic polypeptide
  REGION 1..118: note = RSA1 Variable heavy (vh) domain
EVQLVQSGGGLVQPGGSLRLSCAASGFTFSSYSMNWVRQAPGKGLEWVSYISSSSSTIYYADSVKGRFTISRDNAKNSLYLQMNSLRDEDTAVYYCARGDYYYGMDVWGQGTTVTVSS

SEQ ID NO: 482 - protein, 5 aa, synthetic construct
  REGION 1..5: note = Description of Artificial Sequence: Synthetic peptide
  REGION 1..5: note = RSA1 vhCDR1
SYSMN

SEQ ID NO: 483 - protein, 17 aa, synthetic construct
  REGION 1..17: note = Description of Artificial Sequence: Synthetic peptide
  REGION 1..17: note = RSA1 vhCDR2
YISSSSSTIYYADSVKG

SEQ ID NO: 484 - protein, 9 aa, synthetic construct
  REGION 1..9: note = Description of Artificial Sequence: Synthetic peptide
  REGION 1..9: note = RSA1 vhCDR3
GDYYYGMDV

SEQ ID NO: 485 - protein, 108 aa, synthetic construct
  REGION 1..108: note = Description of Artificial Sequence: Synthetic polypeptide
  REGION 1..108: note = RSA1 Variable light (vl) domain
NIQMTQSPSSVSASVGDRVTITCRASQDISRWLAWYQQKPGKAPKLLIYAASSLQSGVPSRFSGSGSGTDFALTISSLQPEDFATYYCQQADSFFSITFGQGTRLEIK

SEQ ID NO: 486 - protein, 11 aa, synthetic construct
  REGION 1..11: note = Description of Artificial Sequence: Synthetic peptide
  REGION 1..11: note = RSA1 vlCDR1
RASQDISRWLA

SEQ ID NO: 487 - protein, 7 aa, synthetic construct
  REGION 1..7: note = Description of Artificial Sequence: Synthetic peptide
  REGION 1..7: note = RSA1 vlCDR2
AASSLQS

SEQ ID NO: 488 - protein, 10 aa, synthetic construct
  REGION 1..10: note = Description of Artificial Sequence: Synthetic peptide
  REGION 1..10: note = RSA1 vlCDR3
QQADSFFSIT

SEQ ID NO: 489 - protein, 120 aa, synthetic construct
  REGION 1..120: note = Description of Artificial Sequence: Synthetic polypeptide
  REGION 1..120: note = RA3 Variable heavy (vh) domain
QMQLVQSGAEVKKPGSSVKVSCKASGGTFSRYGVHWVRQAPGQGLEWMGRLIPIVSMTNYAQKFQDRVSITTDKSTGTAYMELRSLTSEDTALYYCASVGQQLPWVFFAWGQGTLVTVSS

SEQ ID NO: 490 - protein, 5 aa, synthetic construct
  REGION 1..5: note = Description of Artificial Sequence: Synthetic peptide
  REGION 1..5: note = RA3 vhCDR1
RYGVH

SEQ ID NO: 491 - protein, 17 aa, synthetic construct
  REGION 1..17: note = Description of Artificial Sequence: Synthetic peptide
  REGION 1..17: note = RA3 vhCDR2
RLIPIVSMTNYAQKFQD

SEQ ID NO: 492 - protein, 11 aa, synthetic construct
  REGION 1..11: note = Description of Artificial Sequence: Synthetic peptide
  REGION 1..11: note = RA3 vhCDR3
VGQQLPWVFFA

SEQ ID NO: 493 - protein, 107 aa, synthetic construct
  REGION 1..107: note = Description of Artificial Sequence: Synthetic polypeptide
  REGION 1..107: note = RA3 Variable light (vl) domain
DIQMTQSPSSLSASVGDRVTITCQASQDISNYLNWYQQKPGKAPKLLIYDASTLQSGVPSRFSGSGSGTDFTLTISSLQPEDFATYYCQQSYSSHWTFGQGTKVEIK

SEQ ID NO: 494 - protein, 11 aa, synthetic construct
  REGION 1..11: note = Description of Artificial Sequence: Synthetic peptide
  REGION 1..11: note = RA3 vlCDR1
QASQDISNYLN

SEQ ID NO: 495 - protein, 7 aa, synthetic construct
  REGION 1..7: note = Description of Artificial Sequence: Synthetic peptide
  REGION 1..7: note = RA3 vlCDR2
DASTLQS

SEQ ID NO: 496 - protein, 9 aa, synthetic construct
  REGION 1..9: note = Description of Artificial Sequence: Synthetic peptide
  REGION 1..9: note = RA3 vlCDR3
QQSYSSHWT

SEQ ID NO: 497 - protein, 119 aa, synthetic construct
  REGION 1..119: note = Description of Artificial Sequence: Synthetic polypeptide
  REGION 1..119: note = SH1E2 Variable heavy (vh) domain
EVQLVESGAEVKKPGSSVKVSCKASGGTFSSYAISWVRQAPGQGLEWMGGIIPIFGTANYAQKFQGRVTITADESTSTAYMELSSLRSEDTAVYYCARAPYYYYYMDVWGQGTTVTVSS

SEQ ID NO: 498 - protein, 5 aa, synthetic construct
  REGION 1..5: note = Description of Artificial Sequence: Synthetic peptide
  REGION 1..5: note = SH1E2 vhCDR1
SYAIS

SEQ ID NO: 499 - protein, 17 aa, synthetic construct
  REGION 1..17: note = Description of Artificial Sequence: Synthetic peptide
  REGION 1..17: note = SH1E2 vhCDR2
GIIPIFGTANYAQKFQG

SEQ ID NO: 500 - protein, 10 aa, synthetic construct
  REGION 1..10: note = Description of Artificial Sequence: Synthetic peptide
  REGION 1..10: note = SH1E2 vhCDR3
APYYYYYMDV

SEQ ID NO: 501 - protein, 109 aa, synthetic construct
  REGION 1..109: note = Description of Artificial Sequence: Synthetic polypeptide
  REGION 1..109: note = SH1E2 Variable light (vl) domain
QSALTQPASVSGSLGQSVTISCTGSSSDVGSYNLVSWYQQHPGKAPNLMIYDVSKRSGVSNRFSGSKSGNTASLTISGLQAEDEADYYCSSYTGISTVVFGGGTKLTVL

SEQ ID NO: 502 - protein, 14 aa, synthetic construct
  REGION 1..14: note = Description of Artificial Sequence: Synthetic peptide
  REGION 1..14: note = SH1E2 vlCDR1
TGSSSDVGSYNLVS

SEQ ID NO: 503 - protein, 6 aa, synthetic construct
  REGION 1..6: note = Description of Artificial Sequence: Synthetic peptide
  REGION 1..6: note = SH1E2 vlCDR2
DVSKRS

SEQ ID NO: 504 - protein, 10 aa, synthetic construct
  REGION 1..10: note = Description of Artificial Sequence: Synthetic peptide
  REGION 1..10: note = SH1E2 vlCDR3
SSYTGISTVV

SEQ ID NO: 505 - protein, 120 aa, synthetic construct; identical to SEQ ID NO: 417
  REGION 1..120: note = Description of Artificial Sequence: Synthetic polypeptide
  REGION 1..120: note = SH1E4 Variable heavy (vh) domain

SEQ ID NO: 506 - protein, 5 aa, synthetic construct
  REGION 1..5: note = Description of Artificial Sequence: Synthetic peptide
  REGION 1..5: note = SH1E4 vhCDR1
RYGVH

SEQ ID NO: 507 - protein, 17 aa, synthetic construct
  REGION 1..17: note = Description of Artificial Sequence: Synthetic peptide
  REGION 1..17: note = SH1E4 vhCDR2
RLIPIVSMTNYAQKFQD

SEQ ID NO: 508 - protein, 11 aa, synthetic construct
  REGION 1..11: note = Description of Artificial Sequence: Synthetic peptide
  REGION 1..11: note = SH1E4 vhCDR3
VGQQLPWVFFA

SEQ ID NO: 509 - protein, 112 aa, synthetic construct
  REGION 1..112: note = Description of Artificial Sequence: Synthetic polypeptide
  REGION 1..112: note = SH1E4 Variable light (vl) domain
QSVLTQPPSASGSPGQSVTISCTGTSSDIGGYDSVSWYQQHPGKAPKLMIYDVSKRPSGVSNRFSGSKSGNTASLTISGLQAEDEADYYCSSYTSSSIFFYVFGTGTKVTVL

SEQ ID NO: 510 - protein, 14 aa, synthetic construct
  REGION 1..14: note = Description of Artificial Sequence: Synthetic peptide
  REGION 1..14: note = SH1E4 vlCDR1
TGTSSDIGGYDSVS

SEQ ID NO: 511 - protein, 7 aa, synthetic construct
  REGION 1..7: note = Description of Artificial Sequence: Synthetic peptide
  REGION 1..7: note = SH1E4 vlCDR2
DVSKRPS

SEQ ID NO: 512 - protein, 12 aa, synthetic construct
  REGION 1..12: note = Description of Artificial Sequence: Synthetic peptide
  REGION 1..12: note = SH1E4 vlCDR3
SSYTSSSIFFYV

SEQ ID NO: 513 - protein, 121 aa, synthetic construct
  REGION 1..121: note = Description of Artificial Sequence: Synthetic polypeptide
  REGION 1..121: note = SH1B11 Variable heavy (vh) domain
QVQLVQSGSELKKPGSSVKVSCKASGYSFSGYYIHWVRQAPGQGLEWMGWIDPNSGVTNYVRRFQGRVTMTRDTSLSTAYMELSGLTADDTAVYYCARDENLWQFGYLDYWGQGTLVTVSS

SEQ ID NO: 514 - protein, 5 aa, synthetic construct
  REGION 1..5: note = Description of Artificial Sequence: Synthetic peptide
  REGION 1..5: note = SH1B11 vhCDR1
GYYIH

SEQ ID NO: 515 - protein, 17 aa, synthetic construct
  REGION 1..17: note = Description of Artificial Sequence: Synthetic peptide
  REGION 1..17: note = SH1B11 vhCDR2
WIDPNSGVTNYVRRFQG

SEQ ID NO: 516 - protein, 12 aa, synthetic construct
  REGION 1..12: note = Description of Artificial Sequence: Synthetic peptide
  REGION 1..12: note = SH1B11 vhCDR3
DENLWQFGYLDY

SEQ ID NO: 517 - protein, 107 aa, synthetic construct
  REGION 1..107: note = Description of Artificial Sequence: Synthetic polypeptide
  REGION 1..107: note = SH1B11 Variable light (vl) domain
DIVMTQSPSSLSASIGDRVTITCRASQRISAYVNWYQQKPGKAPKVLIYAASSLRSGVPSRFSGSGSGTDFTLTISSLQPEDFATYYCQQTYSSPWTFGQGTKVEIK

SEQ ID NO: 518 - protein, 11 aa, synthetic construct
  REGION 1..11: note = Description of Artificial Sequence: Synthetic peptide
  REGION 1..11: note = SH1B11 vlCDR1
RASQRISAYVN

SEQ ID NO: 519 - protein, 7 aa, synthetic construct
  REGION 1..7: note = Description of Artificial Sequence: Synthetic peptide
  REGION 1..7: note = SH1B11 vlCDR2
AASSLRS

SEQ ID NO: 520 - protein, 9 aa, synthetic construct
  REGION 1..9: note = Description of Artificial Sequence: Synthetic peptide
  REGION 1..9: note = SH1B11 vlCDR3
QQTYSSPWT

SEQ ID NO: 521 - protein, 119 aa, synthetic construct
  REGION 1..119: note = Description of Artificial Sequence: Synthetic polypeptide
  REGION 1..119: note = SH1C8 Variable heavy (vh) domain
EVQLVESGGGVVQPGRSLRLSCAASGFTFSSYAMHWVRQAPGKGLEWVAVISYDGSNKYYADSVKGRFTISRDNSKNTLYLQMNSLRAEDTAVYYCARGQWLVTELDYWGQGTLVTVSS

SEQ ID NO: 522 - protein, 5 aa, synthetic construct
  REGION 1..5: note = Description of Artificial Sequence: Synthetic peptide
  REGION 1..5: note = SH1C8 vhCDR1
SYAMH

SEQ ID NO: 523 - protein, 17 aa, synthetic construct
  REGION 1..17: note = Description of Artificial Sequence: Synthetic peptide
  REGION 1..17: note = SH1C8 vhCDR2
VISYDGSNKYYADSVKG

SEQ ID NO: 524 - protein, 10 aa, synthetic construct
  REGION 1..10: note = Description of Artificial Sequence: Synthetic peptide
  REGION 1..10: note = SH1C8 vhCDR3
GQWLVTELDY

SEQ ID NO: 525 - protein, 111 aa, synthetic construct
  REGION 1..111: note = Description of Artificial Sequence: Synthetic polypeptide
  REGION 1..111: note = SH1C8 Variable light (vl) domain
QSVVTQPPSVSAAPGQKVTISCSGSSSDIGNHYVSWYQQLPGTAPKLLIYDNNQRPSGIPDRFSGSKSGTSATLAITGLQTGDEADYYCGTWDNSLSPHLLFGGGTKLTVL

SEQ ID NO: 526 - protein, 13 aa, synthetic construct
  REGION 1..13: note = Description of Artificial Sequence: Synthetic peptide
  REGION 1..13: note = SH1C8 vlCDR1
SGSSSDIGNHYVS

SEQ ID NO: 527 - protein, 7 aa, synthetic construct
  REGION 1..7: note = Description of Artificial Sequence: Synthetic peptide
  REGION 1..7: note = SH1C8 vlCDR2
DNNQRPS

SEQ ID NO: 528 - protein, 12 aa, synthetic construct
  REGION 1..12: note = Description of Artificial Sequence: Synthetic peptide
  REGION 1..12: note = SH1C8 vlCDR3
GTWDNSLSPHLL

SEQ ID NO: 529 - protein, 123 aa, synthetic construct
  REGION 1..123: note = Description of Artificial Sequence: Synthetic polypeptide
  REGION 1..123: note = H1H9364P2 Variable heavy (vh) domain
EVQLVESGGGLVQPGRSLRLSCAASGFTFDDYALHWVRQAPGKGLEWVSGISWTGGTIDYADSVKGRFTISRDNAKNSLYLQMSSLRTEDTAIYYCTRDIRGNWKYGGWFDPWGQGTLVTVSS

SEQ ID NO: 530 - protein, 5 aa, synthetic construct
  REGION 1..5: note = Description of Artificial Sequence: Synthetic peptide
  REGION 1..5: note = H1H9364P2 vhCDR1
DYALH

SEQ ID NO: 531 - protein, 17 aa, synthetic construct
  REGION 1..17: note = Description of Artificial Sequence: Synthetic peptide
  REGION 1..17: note = H1H9364P2 vhCDR2
GISWTGGTIDYADSVKG

SEQ ID NO: 532 - protein, 14 aa, synthetic construct
  REGION 1..14: note = Description of Artificial Sequence: Synthetic peptide
  REGION 1..14: note = H1H9364P2 vhCDR3
DIRGNWKYGGWFDP

SEQ ID NO: 533 - protein, 108 aa, synthetic construct
  REGION 1..108: note = Description of Artificial Sequence: Synthetic polypeptide
  REGION 1..108: note = H1H9364P2 Variable light (vl) domain
DIQMTQSPSSLSASVGDRVTITCRASQSISSYLNWYQQKPGKAPKLLIYAASSLQSGVPSRFSGSGSGTDFTLTISSLQPEDFATYYCQQSYSTPPITFGQGTRLEIK

SEQ ID NO: 534 - protein, 11 aa, synthetic construct
  REGION 1..11: note = Description of Artificial Sequence: Synthetic peptide
  REGION 1..11: note = H1H9364P2 vlCDR1
RASQSISSYLN

SEQ ID NO: 535 - protein, 7 aa, synthetic construct
  REGION 1..7: note = Description of Artificial Sequence: Synthetic peptide
  REGION 1..7: note = H1H9364P2 vlCDR2
AASSLQS

SEQ ID NO: 536 - protein, 10 aa, synthetic construct
  REGION 1..10: note = Description of Artificial Sequence: Synthetic peptide
  REGION 1..10: note = H1H9364P2 vlCDR3
QQSYSTPPIT

SEQ ID NO: 537 - protein, 120 aa, synthetic construct
  REGION 1..120: note = Description of Artificial Sequence: Synthetic polypeptide
  REGION 1..120: note = H1H9373P2 Variable heavy (vh) domain
QVQLVQSGTEVKKPGASVKVSCKASGYTFTAYYMHWVRQAPGQGLDWMGWISPNSGFTNYAQKFQGRVTMTRDTSINTFYMELSGLRSDDTAVYYCAREGSTHHNSFDPWGQGTLVTVSS

SEQ ID NO: 538 - protein, 5 aa, synthetic construct
  REGION 1..5: note = Description of Artificial Sequence: Synthetic peptide
  REGION 1..5: note = H1H9373P2 vhCDR1
AYYMH

SEQ ID NO: 539 - protein, 17 aa, synthetic construct
  REGION 1..17: note = Description of Artificial Sequence: Synthetic peptide
  REGION 1..17: note = H1H9373P2 vhCDR2
WISPNSGFTNYAQKFQG

SEQ ID NO: 540 - protein, 11 aa, synthetic construct
  REGION 1..11: note = Description of Artificial Sequence: Synthetic peptide
  REGION 1..11: note = H1H9373P2 vhCDR3
EGSTHHNSFDP

SEQ ID NO: 541 - protein, 108 aa, synthetic construct; identical to SEQ ID NO: 533
  REGION 1..108: note = Description of Artificial Sequence: Synthetic polypeptide
  REGION 1..108: note = H1H9373P2 Variable light (vl) domain

SEQ ID NO: 542 - protein, 11 aa, synthetic construct
  REGION 1..11: note = Description of Artificial Sequence: Synthetic peptide
  REGION 1..11: note = H1H9373P2 vlCDR1
RASQSISSYLN

SEQ ID NO: 543 - protein, 7 aa, synthetic construct
  REGION 1..7: note = Description of Artificial Sequence: Synthetic peptide
  REGION 1..7: note = H1H9373P2 vlCDR2
AASSLQS

SEQ ID NO: 544 - protein, 10 aa, synthetic construct
  REGION 1..10: note = Description of Artificial Sequence: Synthetic peptide
  REGION 1..10: note = H1H9373P2 vlCDR3
QQSYSTPPIT

SEQ ID NO: 545 - protein, 120 aa, synthetic construct
  REGION 1..120: note = Description of Artificial Sequence: Synthetic polypeptide
  REGION 1..120: note = H1H8314N Variable heavy (vh) domain
EVQLVESGGGVVRPGGSLRLSCAASGFTFDDYGMTWVRQAPGRGLEWVSGIHWHGKRTGYADSVKGRFTISRDNAKKSLYLQMNSLKGEDTALYHCVRGGMSTGDWFDPWGQGTLVIVSS

SEQ ID NO: 546 - protein, 5 aa, synthetic construct
  REGION 1..5: note = Description of Artificial Sequence: Synthetic peptide
  REGION 1..5: note = H1H8314N vhCDR1
DYGMT

SEQ ID NO: 547 - protein, 17 aa, synthetic construct
  REGION 1..17: note = Description of Artificial Sequence: Synthetic peptide
  REGION 1..17: note = H1H8314N vhCDR2
GIHWHGKRTGYADSVKG

SEQ ID NO: 548 - protein, 11 aa, synthetic construct
  REGION 1..11: note = Description of Artificial Sequence: Synthetic peptide
  REGION 1..11: note = H1H8314N vhCDR3
GGMSTGDWFDP

SEQ ID NO: 549 - protein, 108 aa, synthetic construct
  REGION 1..108: note = Description of Artificial Sequence: Synthetic polypeptide
  REGION 1..108: note = H1H8314N Variable light (vl) domain
DIQMTQSPSSLSASLGDRVTITCRASQSINSYLNWYQQKPGKAPKLLIYVASSLQSGVPSRFSGSGSGTEFTLTISNLQPEDFATYYCQQSYSTPPITFGQGTRLEIK

SEQ ID NO: 550 - protein, 11 aa, synthetic construct
  REGION 1..11: note = Description of Artificial Sequence: Synthetic peptide
  REGION 1..11: note = H1H8314N vlCDR1
RASQSINSYLN

SEQ ID NO: 551 - protein, 7 aa, synthetic construct
  REGION 1..7: note = Description of Artificial Sequence: Synthetic peptide
  REGION 1..7: note = H1H8314N vlCDR2
VASSLQS

SEQ ID NO: 552 - protein, 10 aa, synthetic construct
  REGION 1..10: note = Description of Artificial Sequence: Synthetic peptide
  REGION 1..10: note = H1H8314N vlCDR3
QQSYSTPPIT

SEQ ID NO: 553 - protein, 119 aa, synthetic construct
  REGION 1..119: note = Description of Artificial Sequence: Synthetic polypeptide
  REGION 1..119: note = PDL1.3.1 Variable heavy (vh) domain
EVQLQQSGTELVKPGASVKLSCTTSGFNIQDTYMHWVKQRPEQGLEWIGWIDPANGNTKYDPKFQGKATIIADTSSNTAYLQLRGLTSEDTAVYYCARSGVSTAHFDYWGQGTTLTVSS

SEQ ID NO: 554 - protein, 5 aa, synthetic construct
  REGION 1..5: note = Description of Artificial Sequence: Synthetic peptide
  REGION 1..5: note = PDL1.3.1 vhCDR1
DTYMH

SEQ ID NO: 555 - protein, 17 aa, synthetic construct
  REGION 1..17: note = Description of Artificial Sequence: Synthetic peptide
  REGION 1..17: note = PDL1.3.1 vhCDR2
WIDPANGNTKYDPKFQG

SEQ ID NO: 556 - protein, 10 aa, synthetic construct
  REGION 1..10: note = Description of Artificial Sequence: Synthetic peptide
  REGION 1..10: note = PDL1.3.1 vhCDR3
SGVSTAHFDY

SEQ ID NO: 557 - protein, 106 aa, synthetic construct
  REGION 1..106: note = Description of Artificial Sequence: Synthetic polypeptide
  REGION 1..106: note = PDL1.3.1 Variable light (vl) domain
QIVLSQSPAILSASPGEKVTMTCRASSSVSFMHWYQQKPGSSPKPWIYATSNLASGVPTRFSGSGSGTSYSLTLSRVEAEDAATYYCQQWSSYPRTFGGGTKLEIK

SEQ ID NO: 558 - protein, 10 aa, synthetic construct
  REGION 1..10: note = Description of Artificial Sequence: Synthetic peptide
  REGION 1..10: note = PDL1.3.1 vlCDR1
RASSSVSFMH

SEQ ID NO: 559 - protein, 7 aa, synthetic construct
  REGION 1..7: note = Description of Artificial Sequence: Synthetic peptide
  REGION 1..7: note = PDL1.3.1 vlCDR2
ATSNLAS

SEQ ID NO: 560 - protein, 9 aa, synthetic construct
  REGION 1..9: note = Description of Artificial Sequence: Synthetic peptide
  REGION 1..9: note = PDL1.3.1 vlCDR3
QQWSSYPRT

SEQ ID NO: 561 - protein, 121 aa, synthetic construct
  REGION 1..121: note = Description of Artificial Sequence: Synthetic polypeptide
  REGION 1..121: note = 1A7[CD28]_H1.1
EVQLLESGGGLVQPGGSLRLSCAASGFTFSSYYMSWVRQAPGKGLEWVSTISGSGDSTYYADSVKGRFTISRDNSKNTLYLQMNSLRAEDTAVYYCAKSGPGLRQVGFDYWGQGTLVTVSS

SEQ ID NO: 562 - protein, 121 aa, synthetic construct
  REGION 1..121: note = Description of Artificial Sequence: Synthetic polypeptide
  REGION 1..121: note = 1A7[CD28]_H1.2
EVQLLESGGGLVQPGGSLRLSCAASGFTFSSYAMSWVRQAPGKGLEWVSTIDGSGDSTYYADSVKGRFTISRDNSKNTLYLQMNSLRAEDTAVYYCAKSGPGLRQVGFDYWGQGTLVTVSS

SEQ ID NO: 563 - protein, 121 aa, synthetic construct
  REGION 1..121: note = Description of Artificial Sequence: Synthetic polypeptide
  REGION 1..121: note = 1A7[CD28]_H1.3
EVQLLESGGGLVQPGGSLRLSCAASGFTFSSYAMSWVRQAPGKGLEWVSTIEGSGDSTYYADSVKGRFTISRDNSKNTLYLQMNSLRAEDTAVYYCAKSGPGLRQVGFDYWGQGTLVTVSS

SEQ ID NO: 564 - protein, 121 aa, synthetic construct
  REGION 1..121: note = Description of Artificial Sequence: Synthetic polypeptide
  REGION 1..121: note = 1A7[CD28]_H1.4
EVQLLESGGGLVQPGGSLRLSCAASGFTFSSYAMSWVRQAPGKGLEWVSTIYGSGDSTYYADSVKGRFTISRDNSKNTLYLQMNSLRAEDTAVYYCAKSGPGLRQVGFDYWGQGTLVTVSS

SEQ ID NO: 565 - protein, 121 aa, synthetic construct
  REGION 1..121: note = Description of Artificial Sequence: Synthetic polypeptide
  REGION 1..121: note = 1A7[CD28]_H1.5
EVQLLESGGGLVQPGGSLRLSCAASGFTFSSYAMSWVRQAPGKGLEWVSTISDSGDSTYYADSVKGRFTISRDNSKNTLYLQMNSLRAEDTAVYYCAKSGPGLRQVGFDYWGQGTLVTVSS

SEQ ID NO: 566 - protein, 121 aa, synthetic construct
  REGION 1..121: note = Description of Artificial Sequence: Synthetic polypeptide
  REGION 1..121: note = 1A7[CD28]_H1.6
EVQLLESGGGLVQPGGSLRLSCAASGFTFSSYAMSWVRQAPGKGLEWVSTISESGDSTYYADSVKGRFTISRDNSKNTLYLQMNSLRAEDTAVYYCAKSGPGLRQVGFDYWGQGTLVTVSS

SEQ ID NO: 567 - protein, 121 aa, synthetic construct
  REGION 1..121: note = Description of Artificial Sequence: Synthetic polypeptide
  REGION 1..121: note = 1A7[CD28]_H1.7
EVQLLESGGGLVQPGGSLRLSCAASGFTFSSYAMSWVRQAPGKGLEWVSTISGSGTSTYYADSVKGRFTISRDNSKNTLYLQMNSLRAEDTAVYYCAKSGPGLRQVGFDYWGQGTLVTVSS

SEQ ID NO: 568 - protein, 121 aa, synthetic construct
  REGION 1..121: note = Description of Artificial Sequence: Synthetic polypeptide
  REGION 1..121: note = 1A7[CD28]_H1.8
EVQLLESGGGLVQPGGSLRLSCAASGFTFSSYAMSWVRQAPGKGLEWVSTISGSGYSTYYADSVKGRFTISRDNSKNTLYLQMNSLRAEDTAVYYCAKSGPGLRQVGFDYWGQGTLVTVSS

SEQ ID NO: 569 - protein, 121 aa, synthetic construct
  REGION 1..121: note = Description of Artificial Sequence: Synthetic polypeptide
  REGION 1..121: note = 1A7[CD28]_H1.9
EVQLLESGGGLVQPGGSLRLSCAASGFTFSSYAMSWVRQAPGKGLEWVSTISGSGDYTYYADSVKGRFTISRDNSKNTLYLQMNSLRAEDTAVYYCAKSGPGLRQVGFDYWGQGTLVTVSS

SEQ ID NO: 570 - protein, 121 aa, synthetic construct
  REGION 1..121: note = Description of Artificial Sequence: Synthetic polypeptide
  REGION 1..121: note = 1A7[CD28]_H1.10
EVQLLESGGGLVQPGGSLRLSCAASGFTFSSYYMSWVRQAPGKGLEWVSTIDGSGDSTYYADSVKGRFTISRDNSKNTLYLQMNSLRAEDTAVYYCAKSGPGLRQVGFDYWGQGTLVTVSS

SEQ ID NO: 571 - protein, 121 aa, synthetic construct
  REGION 1..121: note = Description of Artificial Sequence: Synthetic polypeptide
  REGION 1..121: note = 1A7[CD28]_H1.11
EVQLLESGGGLVQPGGSLRLSCAASGFTFSSYYMSWVRQAPGKGLEWVSTIEGSGDSTYYADSVKGRFTISRDNSKNTLYLQMNSLRAEDTAVYYCAKSGPGLRQVGFDYWGQGTLVTVSS

SEQ ID NO: 572 - protein, 121 aa, synthetic construct
  REGION 1..121: note = Description of Artificial Sequence: Synthetic polypeptide
  REGION 1..121: note = 1A7[CD28]_H1.12
EVQLLESGGGLVQPGGSLRLSCAASGFTFSSYYMSWVRQAPGKGLEWVSTIYGSGDSTYYADSVKGRFTISRDNSKNTLYLQMNSLRAEDTAVYYCAKSGPGLRQVGFDYWGQGTLVTVSS

SEQ ID NO: 573 - protein, 121 aa, synthetic construct
  REGION 1..121: note = Description of Artificial Sequence: Synthetic polypeptide
  REGION 1..121: note = 1A7[CD28]_H1.13
EVQLLESGGGLVQPGGSLRLSCAASGFTFSSYYMSWVRQAPGKGLEWVSTISDSGDSTYYADSVKGRFTISRDNSKNTLYLQMNSLRAEDTAVYYCAKSGPGLRQVGFDYWGQGTLVTVSS

SEQ ID NO: 574 - protein, 121 aa, synthetic construct
  REGION 1..121: note = Description of Artificial Sequence: Synthetic polypeptide
  REGION 1..121: note = 1A7[CD28]_H1.14
EVQLLESGGGLVQPGGSLRLSCAASGFTFSSYYMSWVRQAPGKGLEWVSTISESGDSTYYADSVKGRFTISRDNSKNTLYLQMNSLRAEDTAVYYCAKSGPGLRQVGFDYWGQGTLVTVSS

SEQ ID NO: 575 - protein, 121 aa, synthetic construct
  REGION 1..121: note = Description of Artificial Sequence: Synthetic polypeptide
  REGION 1..121: note = 1A7[CD28]_H1.15
EVQLLESGGGLVQPGGSLRLSCAASGFTFSSYYMSWVRQAPGKGLEWVSTISGSGTSTYYADSVKGRFTISRDNSKNTLYLQMNSLRAEDTAVYYCAKSGPGLRQVGFDYWGQGTLVTVSS

SEQ ID NO: 576 - protein, 121 aa, synthetic construct
  REGION 1..121: note = Description of Artificial Sequence: Synthetic polypeptide
  REGION 1..121: note = 1A7[CD28]_H1.16
EVQLLESGGGLVQPGGSLRLSCAASGFTFSSYYMSWVRQAPGKGLEWVSTISGSGYSTYYADSVKGRFTISRDNSKNTLYLQMNSLRAEDTAVYYCAKSGPGLRQVGFDYWGQGTLVTVSS

SEQ ID NO: 577 - protein, 121 aa, synthetic construct
  REGION 1..121: note = Description of Artificial Sequence: Synthetic polypeptide
  REGION 1..121: note = 1A7[CD28]_H1.17
EVQLLESGGGLVQPGGSLRLSCAASGFTFSSYYMSWVRQAPGKGLEWVSTISGSGDYTYYADSVKGRFTISRDNSKNTLYLQMNSLRAEDTAVYYCAKSGPGLRQVGFDYWGQGTLVTVSS

SEQ ID NO: 578 - protein, 121 aa, synthetic construct
  REGION 1..121: note = Description of Artificial Sequence: Synthetic polypeptide
  REGION 1..121: note = 1A7[CD28]_H1.18
EVQLLESGGGLVQPGGSLRLSCAASGFTFSSYAMSWVRQAPGKGLEWVSTIDDSGDSTYYADSVKGRFTISRDNSKNTLYLQMNSLRAEDTAVYYCAKSGPGLRQVGFDYWGQGTLVTVSS

SEQ ID NO: 579 - protein, 121 aa, synthetic construct
  REGION 1..121: note = Description of Artificial Sequence: Synthetic polypeptide
  REGION 1..121: note = 1A7[CD28]_H1.19
EVQLLESGGGLVQPGGSLRLSCAASGFTFSSYAMSWVRQAPGKGLEWVSTIDESGDSTYYADSVKGRFTISRDNSKNTLYLQMNSLRAEDTAVYYCAKSGPGLRQVGFDYWGQGTLVTVSS

SEQ ID NO: 580 - protein, 121 aa, synthetic construct
  REGION 1..121: note = Description of Artificial Sequence: Synthetic polypeptide
  REGION 1..121: note = 1A7[CD28]_H1.20
EVQLLESGGGLVQPGGSLRLSCAASGFTFSSYAMSWVRQAPGKGLEWVSTIDGSGTSTYYADSVKGRFTISRDNSKNTLYLQMNSLRAEDTAVYYCAKSGPGLRQVGFDYWGQGTLVTVSS

SEQ ID NO: 581 - protein, 121 aa, synthetic construct
  REGION 1..121: note = Description of Artificial Sequence: Synthetic polypeptide
  REGION 1..121: note = 1A7[CD28]_H1.21
EVQLLESGGGLVQPGGSLRLSCAASGFTFSSYAMSWVRQAPGKGLEWVSTIDGSGYSTYYADSVKGRFTISRDNSKNTLYLQMNSLRAEDTAVYYCAKSGPGLRQVGFDYWGQGTLVTVSS

SEQ ID NO: 582 - protein, 121 aa, synthetic construct
  REGION 1..121: note = Description of Artificial Sequence: Synthetic polypeptide
  REGION 1..121: note = 1A7[CD28]_H1.22
EVQLLESGGGLVQPGGSLRLSCAASGFTFSSYAMSWVRQAPGKGLEWVSTIDGSGDYTYYADSVKGRFTISRDNSKNTLYLQMNSLRAEDTAVYYCAKSGPGLRQVGFDYWGQGTLVTVSS

SEQ ID NO: 583 - protein, 121 aa, synthetic construct
  REGION 1..121: note = Description of Artificial Sequence: Synthetic polypeptide
  REGION 1..121: note = 1A7[CD28]_H1.23
EVQLLESGGGLVQPGGSLRLSCAASGFTFSSYAMSWVRQAPGKGLEWVSTIEDSGDSTYYADSVKGRFTISRDNSKNTLYLQMNSLRAEDTAVYYCAKSGPGLRQVGFDYWGQGTLVTVSS

SEQ ID NO: 584 - protein, 121 aa, synthetic construct
  REGION 1..121: note = Description of Artificial Sequence: Synthetic polypeptide
  REGION 1..121: note = 1A7[CD28]_H1.24
EVQLLESGGGLVQPGGSLRLSCAASGFTFSSYAMSWVRQAPGKGLEWVSTIEESGDSTYYADSVKGRFTISRDNSKNTLYLQMNSLRAEDTAVYYCAKSGPGLRQVGFDYWGQGTLVTVSS

SEQ ID NO: 585 - protein, 121 aa, synthetic construct
  REGION 1..121: note = Description of Artificial Sequence: Synthetic polypeptide
  REGION 1..121: note = 1A7[CD28]_H1.25
EVQLLESGGGLVQPGGSLRLSCAASGFTFSSYAMSWVRQAPGKGLEWVSTIEGSGTSTYYADSVKGRFTISRDNSKNTLYLQMNSLRAEDTAVYYCAKSGPGLRQVGFDYWGQGTLVTVSS

SEQ ID NO: 586 - protein, 121 aa, synthetic construct
  REGION 1..121: note = Description of Artificial Sequence: Synthetic polypeptide
  REGION 1..121: note = 1A7[CD28]_H1.26
EVQLLESGGGLVQPGGSLRLSCAASGFTFSSYAMSWVRQAPGKGLEWVSTIEGSGYSTYYADSVKGRFTISRDNSKNTLYLQMNSLRAEDTAVYYCAKSGPGLRQVGFDYWGQGTLVTVSS

SEQ ID NO: 587 - protein, 121 aa, synthetic construct
  REGION 1..121: note = Description of Artificial Sequence: Synthetic polypeptide
  REGION 1..121: note = 1A7[CD28]_H1.27
EVQLLESGGGLVQPGGSLRLSCAASGFTFSSYAMSWVRQAPGKGLEWVSTIEGSGDYTYYADSVKGRFTISRDNSKNTLYLQMNSLRAEDTAVYYCAKSGPGLRQVGFDYWGQGTLVTVSS

SEQ ID NO: 588 - protein, 121 aa, synthetic construct
  REGION 1..121: note = Description of Artificial Sequence: Synthetic polypeptide
  REGION 1..121: note = 1A7[CD28]_H1.28
EVQLLESGGGLVQPGGSLRLSCAASGFTFSSYAMSWVRQAPGKGLEWVSTIYDSGDSTYYADSVKGRFTISRDNSKNTLYLQMNSLRAEDTAVYYCAKSGPGLRQVGFDYWGQGTLVTVSS

SEQ ID NO: 589 - protein, 121 aa, synthetic construct
  REGION 1..121: note = Description of Artificial Sequence: Synthetic polypeptide
  REGION 1..121: note = 1A7[CD28]_H1.29
EVQLLESGGGLVQPGGSLRLSCAASGFTFSSYAMSWVRQAPGKGLEWVSTIYESGDSTYYADSVKGRFTISRDNSKNTLYLQMNSLRAEDTAVYYCAKSGPGLRQVGFDYWGQGTLVTVSS

SEQ ID NO: 590 - protein, 121 aa, synthetic construct
  REGION 1..121: note = Description of Artificial Sequence: Synthetic polypeptide
  REGION 1..121: note = 1A7[CD28]_H1.30
EVQLLESGGGLVQPGGSLRLSCAASGFTFSSYAMSWVRQAPGKGLEWVSTIYGSGTSTYYADSVKGRFTISRDNSKNTLYLQMNSLRAEDTAVYYCAKSGPGLRQVGFDYWGQGTLVTVSS

SEQ ID NO: 591 - protein, 121 aa, synthetic construct
  REGION 1..121: note = Description of Artificial Sequence: Synthetic polypeptide
  REGION 1..121: note = 1A7[CD28]_H1.31
EVQLLESGGGLVQPGGSLRLSCAASGFTFSSYAMSWVRQAPGKGLEWVSTIYGSGYSTYYADSVKGRFTISRDNSKNTLYLQMNSLRAEDTAVYYCAKSGPGLRQVGFDYWGQGTLVTVSS

SEQ ID NO: 592 - protein, 121 aa, synthetic construct
  REGION 1..121: note = Description of Artificial Sequence: Synthetic polypeptide
  REGION 1..121: note = 1A7[CD28]_H1.32
EVQLLESGGGLVQPGGSLRLSCAASGFTFSSYAMSWVRQAPGKGLEWVSTIYGSGDYTYYADSVKGRFTISRDNSKNTLYLQMNSLRAEDTAVYYCAKSGPGLRQVGFDYWGQGTLVTVSS

SEQ ID NO: 593 - protein, 121 aa, synthetic construct
  REGION 1..121: note = Description of Artificial Sequence: Synthetic polypeptide
  REGION 1..121: note = 1A7[CD28]_H1.33
EVQLLESGGGLVQPGGSLRLSCAASGFTFSSYAMSWVRQAPGKGLEWVSTISDSGTSTYYADSVKGRFTISRDNSKNTLYLQMNSLRAEDTAVYYCAKSGPGLRQVGFDYWGQGTLVTVSS

SEQ ID NO: 594 - protein, 121 aa, synthetic construct
  REGION 1..121: note = Description of Artificial Sequence: Synthetic polypeptide
  REGION 1..121: note = 1A7[CD28]_H1.34
EVQLLESGGGLVQPGGSLRLSCAASGFTFSSYAMSWVRQAPGKGLEWVSTISDSGYSTYYADSVKGRFTISRDNSKNTLYLQMNSLRAEDTAVYYCAKSGPGLRQVGFDYWGQGTLVTVSS

SEQ ID NO: 595 - protein, 121 aa, synthetic construct
  REGION 1..121: note = Description of Artificial Sequence: Synthetic polypeptide
  REGION 1..121: note = 1A7[CD28]_H1.35
EVQLLESGGGLVQPGGSLRLSCAASGFTFSSYAMSWVRQAPGKGLEWVSTISDSGDYTYYADSVKGRFTISRDNSKNTLYLQMNSLRAEDTAVYYCAKSGPGLRQVGFDYWGQGTLVTVSS

SEQ ID NO: 596 - protein, 121 aa, synthetic construct
  REGION 1..121: note = Description of Artificial Sequence: Synthetic polypeptide
  REGION 1..121: note = 1A7[CD28]_H1.36
EVQLLESGGGLVQPGGSLRLSCAASGFTFSSYAMSWVRQAPGKGLEWVSTISESGTSTYYADSVKGRFTISRDNSKNTLYLQMNSLRAEDTAVYYCAKSGPGLRQVGFDYWGQGTLVTVSS

SEQ ID NO: 597 - protein, 121 aa, synthetic construct
  REGION 1..121: note = Description of Artificial Sequence: Synthetic polypeptide
  REGION 1..121: note = 1A7[CD28]_H1.37
EVQLLESGGGLVQPGGSLRLSCAASGFTFSSYAMSWVRQAPGKGLEWVSTISESGYSTYYADSVKGRFTISRDNSKNTLYLQMNSLRAEDTAVYYCAKSGPGLRQVGFDYWGQGTLVTVSS

SEQ ID NO: 598 - protein, 121 aa, synthetic construct
  REGION 1..121: note = Description of Artificial Sequence: Synthetic polypeptide
  REGION 1..121: note = 1A7[CD28]_H1.38
EVQLLESGGGLVQPGGSLRLSCAASGFTFSSYAMSWVRQAPGKGLEWVSTISESGDYTYYADSVKGRFTISRDNSKNTLYLQMNSLRAEDTAVYYCAKSGPGLRQVGFDYWGQGTLVTVSS

SEQ ID NO: 599 - protein, 121 aa, synthetic construct
  REGION 1..121: note = Description of Artificial Sequence: Synthetic polypeptide
  REGION 1..121: note = 1A7[CD28]_H1.39
EVQLLESGGGLVQPGGSLRLSCAASGFTFSSYAMSWVRQAPGKGLEWVSTISGSGTYTYYADSVKGRFTISRDNSKNTLYLQMNSLRAEDTAVYYCAKSGPGLRQVGFDYWGQGTLVTVSS

SEQ ID NO: 600 - protein, 121 aa, synthetic construct
  REGION 1..121: note = Description of Artificial Sequence: Synthetic polypeptide
  REGION 1..121: note = 1A7[CD28]_H1.40
EVQLLESGGGLVQPGGSLRLSCAASGFTFSSYAMSWVRQAPGKGLEWVSTISGSGYYTYYADSVKGRFTISRDNSKNTLYLQMNSLRAEDTAVYYCAKSGPGLRQVGFDYWGQGTLVTVSS

SEQ ID NO: 601 - protein, 121 aa, synthetic construct
  REGION 1..121: note = Description of Artificial Sequence: Synthetic polypeptide
  REGION 1..121: note = 1A7[CD28]_H1.41
EVQLLESGGGLVQPGGSLRLSCAASGFTFSSYYMSWVRQAPGKGLEWVSTIEGSGDYTYYADSVKGRFTISRDNSKNTLYLQMNSLRAEDTAVYYCAKSGPGLRQVGFDYWGQGTLVTVSS

SEQ ID NO: 602 - protein, 121 aa, synthetic construct
  REGION 1..121: note = Description of Artificial Sequence: Synthetic polypeptide
  REGION 1..121: note = 1A7[CD28]_H1.42
EVQLLESGGGLVQPGGSLRLSCAASGFTFSSYYMSWVRQAPGKGLEWVSTISESGDYTYYADSVKGRFTISRDNSKNTLYLQMNSLRAEDTAVYYCAKSGPGLRQVGFDYWGQGTLVTVSS

SEQ ID NO: 603 - protein, 121 aa, synthetic construct
  REGION 1..121: note = Description of Artificial Sequence: Synthetic polypeptide
  REGION 1..121: note = 1A7[CD28]_H1.43
EVQLLESGGGLVQPGGSLRLSCAASGFSFSGNYMTWVRQAPGKGLEWVATITADSDATYYADSVKGRFTISRDNSKNTLYLQMNSLRAEDTAVYYCAKSGPGLRQVGFDYWGQGTLVTVSS

SEQ ID NO: 604 - protein, 121 aa, synthetic construct
  REGION 1..121: note = Description of Artificial Sequence: Synthetic polypeptide
  REGION 1..121: note = 1A7[CD28]_H1.44
EVQLLESGGGLVQPGGSLRLSCAASGFTFSGYSMNWVRQAPGKGLEWVATIYANGSYTYYADSVKGRFTISRDNSKNTLYLQMNSLRAEDTAVYYCAKSGPGLRQVGFDYWGQGTLVTVSS

SEQ ID NO: 605 - protein, 121 aa, synthetic construct
  REGION 1..121: note = Description of Artificial Sequence: Synthetic polypeptide
  REGION 1..121: note = 1A7[CD28]_H1.45
EVQLLESGGGLVQPGGSLRLSCAASGFNFEEYSMNWVRQAPGKGLEWVATITYNGDYTYYADSVKGRFTISRDNSKNTLYLQMNSLRAEDTAVYYCAKSGPGLRQVGFDYWGQGTLVTVSS

SEQ ID NO: 606 - protein, 121 aa, synthetic construct
  REGION 1..121: note = Description of Artificial Sequence: Synthetic polypeptide
  REGION 1..121: note = 1A7[CD28]_H1.46
EVQLLESGGGLVQPGGSLRLSCAASGFSFRTYYMTWVRQAPGKGLEWVATITSDGDYTYYADSVKGRFTISRDNSKNTLYLQMNSLRAEDTAVYYCAKSGPGLRQVGFDYWGQGTLVTVSS

SEQ ID NO: 607 - protein, 121 aa, synthetic construct
  REGION 1..121: note = Description of Artificial Sequence: Synthetic polypeptide
  REGION 1..121: note = 1A7[CD28]_H1.47
EVQLLESGGGLVQPGGSLRLSCAASGFSFKGYSMNWVRQAPGKGLEWVATIYASSDSTYYADSVKGRFTISRDNSKNTLYLQMNSLRAEDTAVYYCAKSGPGLRQVGFDYWGQGTLVTVSS

SEQ ID NO: 608 - protein, 121 aa, synthetic construct
  REGION 1..121: note = Description of Artificial Sequence: Synthetic polypeptide
  REGION 1..121: note = 1A7[CD28]_H1.48
EVQLLESGGGLVQPGGSLRLSCAASGFSFGEYSMNWVRQAPGKGLEWVSTIYADGDYTYYADSVKGRFTISRDNSKNTLYLQMNSLRAEDTAVYYCAKSGPGLRQVGFDYWGQGTLVTVSS

SEQ ID NO: 609 - protein, 121 aa, synthetic construct
  REGION 1..121: note = Description of Artificial Sequence: Synthetic polypeptide
  REGION 1..121: note = 1A7[CD28]_H1.49
EVQLLESGGGLVQPGGSLRLSCAASGFTFTDYSMNWVRQAPGKGLEWVATIYADSSSTYYADSVKGRFTISRDNSKNTLYLQMNSLRAEDTAVYYCAKSGPGLRQVGFDYWGQGTLVTVSS

SEQ ID NO: 610 - protein, 121 aa, synthetic construct
  REGION 1..121: note = Description of Artificial Sequence: Synthetic polypeptide
  REGION 1..121: note = 1A7[CD28]_H1.50
EVQLLESGGGLVQPGGSLRLSCAASGFTFGGYSMNWVRQAPGKGLEWVATIYYDSTTTYYADSVKGRFTISRDNSKNTLYLQMNSLRAEDTAVYYCAKSGPGLRQVGFDYWGQGTLVTVSS

SEQ ID NO: 611 - protein, 121 aa, synthetic construct
  REGION 1..121: note = Description of Artificial Sequence: Synthetic polypeptide
  REGION 1..121: note = 1A7[CD28]_H1.51
EVQLLESGGGLVQPGGSLRLSCAASGFTFGAYSMNWVRQAPGKGLEWVSTIYNDGATTYYADSVKGRFTISRDNSKNTLYLQMNSLRAEDTAVYYCAKSGPGLRQVGFDYWGQGTLVTVSS

SEQ ID NO: 612 - protein, 121 aa, synthetic construct
  REGION 1..121: note = Description of Artificial Sequence: Synthetic polypeptide
  REGION 1..121: note = 1A7[CD28]_H1.52
EVQLLESGGGLVQPGGSLRLSCAASGFSFEAYSMNWVRQAPGKGLEWVATIYYDSSYTYYADSVKGRFTISRDNSKNTLYLQMNSLRAEDTAVYYCAKSGPGLRQVGFDYWGQGTLVTVSS

SEQ ID NO: 613 - protein, 121 aa, synthetic construct
  REGION 1..121: note = Description of Artificial Sequence: Synthetic polypeptide
  REGION 1..121: note = 1A7[CD28]_H1.53
EVQLLESGGGLVQPGGSLRLSCAASGFSFGSYYMSWVRQAPGKGLEWVASIYYGGYDTYYADSVKGRFTISRDNSKNTLYLQMNSLRAEDTAVYYCAKSGPGLRQVGFDYWGQGTLVTVSS

SEQ ID NO: 614 - protein, 121 aa, synthetic construct
  REGION 1..121: note = Description of Artificial Sequence: Synthetic polypeptide
  REGION 1..121: note = 1A7[CD28]_H1.54
EVQLLESGGGLVQPGGSLRLSCAASGFNFAEYSMSWVRQAPGKGLEWVATIYAGSDYTYYADSVKGRFTISRDNSKNTLYLQMNSLRAEDTAVYYCAKSGPGLRQVGFDYWGQGTLVTVSS

SEQ ID NO: 615 - protein, 121 aa, synthetic construct
  REGION 1..121: note = Description of Artificial Sequence: Synthetic polypeptide
  REGION 1..121: note = 1A7[CD28]_H1.55
EVQLLESGGGLVQPGGSLRLSCAASGFTFGAYSINWVRQAPGKGLEWVATIYYDGSYTYYADSVKGRFTISRDNSKNTLYLQMNSLRAEDTAVYYCAKSGPGLRQVGFDYWGQGTLVTVSS

SEQ ID NO: 616 - protein, 121 aa, synthetic construct
  REGION 1..121: note = Description of Artificial Sequence: Synthetic polypeptide
  REGION 1..121: note = 1A7[CD28]_H1.56
EVQLLESGGGLVQPGGSLRLSCAASGFTFSRYYINWVRQAPGKGLEWVASIYDGGADTYYADSVKGRFTISRDNSKNTLYLQMNSLRAEDTAVYYCAKSGPGLRQVGFDYWGQGTLVTVSS

SEQ ID NO: 617 - protein, 121 aa, synthetic construct
  REGION 1..121: note = Description of Artificial Sequence: Synthetic polypeptide
  REGION 1..121: note = 1A7[CD28]_H1.57
EVQLLESGGGLVQPGGSLRLSCAASGFSFGTYSINWVRQAPGKGLEWVSTIYYDGASTYYADSVKGRFTISRDNSKNTLYLQMNSLRAEDTAVYYCAKSGPGLRQVGFDYWGQGTLVTVSS

SEQ ID NO: 618 - protein, 121 aa, synthetic construct
  REGION 1..121: note = Description of Artificial Sequence: Synthetic polypeptide
  REGION 1..121: note = 1A7[CD28]_H1.58
EVQLLESGGGLVQPGGSLRLSCAASGFTFGKYSISWVRQAPGKGLEWVATIYNDGYYTYYADSVKGRFTISRDNSKNTLYLQMNSLRAEDTAVYYCAKSGPGLRQVGFDYWGQGTLVTVSS

SEQ ID NO: 619 - protein, 121 aa, synthetic construct
  REGION 1..121: note = Description of Artificial Sequence: Synthetic polypeptide
  REGION 1..121: note = 1A7[CD28]_H1.59
EVQLLESGGGLVQPGGSLRLSCAASGFSFEKYYISWVRQAPGKGLEWVASIYDGSYDTYYADSVKGRFTISRDNSKNTLYLQMNSLRAEDTAVYYCAKSGPGLRQVGFDYWGQGTLVTVSS

SEQ ID NO: 620 - protein, 121 aa, synthetic construct
  REGION 1..121: note = Description of Artificial Sequence: Synthetic polypeptide
  REGION 1..121: note = 1A7[CD28]_H1.60
EVQLLESGGGLVQPGGSLRLSCAASGFSFGTYSMNWVRQAPGKGLEWVATIDYDGSNTYYADSVKGRFTISRDNSKNTLYLQMNSLRAEDTAVYYCAKSGPGLRQVGFDYWGQGTLVTVSS

SEQ ID NO: 621 - protein, 121 aa, synthetic construct
  REGION 1..121: note = Description of Artificial Sequence: Synthetic polypeptide
  REGION 1..121: note = 1A7[CD28]_H1.61
EVQLLESGGGLVQPGGSLRLSCAASGFSFAAYSMSWVRQAPGKGLEWVATIYAGSDYTYYADSVKGRFTISRDNSKNTLYLQMNSLRAEDTAVYYCAKSGPGLRQVGFDYWGQGTLVTVSS

SEQ ID NO: 622 - protein, 121 aa, synthetic construct
  REGION 1..121: note = Description of Artificial Sequence: Synthetic polypeptide
  REGION 1..121: note = 1A7[CD28]_H1.62
EVQLLESGGGLVQPGGSLRLSCAASGFTFTTYSMTWVRQAPGKGLEWVATIYNDGYYTYYADSVKGRFTISRDNSKNTLYLQMNSLRAEDTAVYYCAKSGPGLRQVGFDYWGQGTLVTVSS

SEQ ID NO: 623 - protein, 121 aa, synthetic construct
  REGION 1..121: note = Description of Artificial Sequence: Synthetic polypeptide
  REGION 1..121: note = 1A7[CD28]_H1.63
EVQLLESGGGLVQPGGSLRLSCAASGFSFKDYSMNWVRQAPGKGLEWVATIYYDGTYTYYADSVKGRFTISRDNSKNTLYLQMNSLRAEDTAVYYCAKSGPGLRQVGFDYWGQGTLVTVSS

SEQ ID NO: 624 - protein, 121 aa, synthetic construct
  REGION 1..121: note = Description of Artificial Sequence: Synthetic polypeptide
  REGION 1..121: note = 1A7[CD28]_H1.64
EVQLLESGGGLVQPGGSLRLSCAASGFSFAAYSMNWVRQAPGKGLEWVATIYAGGAYTYYADSVKGRFTISRDNSKNTLYLQMNSLRAEDTAVYYCAKSGPGLRQVGFDYWGQGTLVTVSS

SEQ ID NO: 625 - protein, 121 aa, synthetic construct
  REGION 1..121: note = Description of Artificial Sequence: Synthetic polypeptide
  REGION 1..121: note = 1A7[CD28]_H1.65
EVQLLESGGGLVQPGGSLRLSCAASGFNFAEYYISWVRQAPGKGLEWVASIYNGGSDTYYADSVKGRFTISRDNSKNTLYLQMNSLRAEDTAVYYCAKSGPGLRQVGFDYWGQGTLVTVSS

SEQ ID NO: 626 - protein, 121 aa, synthetic construct
  REGION 1..121: note = Description of Artificial Sequence: Synthetic polypeptide
  REGION 1..121: note = 1A7[CD28]_H1.66
EVQLLESGGGLVQPGGSLRLSCAASGFSLGEYYMNWVRQAPGKGLEWVSTIDYDGTYTYYADSVKGRFTISRDNSKNTLYLQMNSLRAEDTAVYYCAKSGPGLRQVGFDYWGQGTLVTVSS

SEQ ID NO: 627 - protein, 121 aa, synthetic construct
  REGION 1..121: note = Description of Artificial Sequence: Synthetic polypeptide
  REGION 1..121: note = 1A7[CD28]_H1.67
EVQLLESGGGLVQPGGSLRLSCAASGFTFNEYYITWVRQAPGKGLEWVSSIYSSSYDTYYADSVKGRFTISRDNSKNTLYLQMNSLRAEDTAVYYCAKSGPGLRQVGFDYWGQGTLVTVSS

SEQ ID NO: 628 - protein, 121 aa, synthetic construct
  REGION 1..121: note = Description of Artificial Sequence: Synthetic polypeptide
  REGION 1..121: note = 1A7[CD28]_H1.68
EVQLLESGGGLVQPGGSLRLSCAASGFTFKDYYITWVRQAPGKGLEWVSSIYTSGYDTYYADSVKGRFTISRDNSKNTLYLQMNSLRAEDTAVYYCAKSGPGLRQVGFDYWGQGTLVTVSS

SEQ ID NO: 629 - protein, 121 aa, synthetic construct
  REGION 1..121: note = Description of Artificial Sequence: Synthetic polypeptide
  REGION 1..121: note = 1A7[CD28]_H1.69
EVQLLESGGGLVQPGGSLRLSCAASGFSFGKYSINWVRQAPGKGLEWVATIYSDGTDTYYADSVKGRFTISRDNSKNTLYLQMNSLRAEDTAVYYCAKSGPGLRQVGFDYWGQGTLVTVSS

SEQ ID NO: 630 - protein, 107 aa, synthetic construct
  REGION 1..107: note = Description of Artificial Sequence: Synthetic polypeptide
  REGION 1..107: note = 1A7[CD28]_L1.1
DIQMTQSPSSLSASVGDRVTITCRASQSISAYLNWYQQKPGKAPKLLIYAASSLQSGVPSRFSGSGSGTDFTLTISSLQPEDFATYYCQQSYSTPFTFGQGTKLEIK

SEQ ID NO: 631 - protein, 107 aa, synthetic construct
  REGION 1..107: note = Description of Artificial Sequence: Synthetic polypeptide
  REGION 1..107: note = 1A7[CD28]_L1.2
DIQMTQSPSSLSASVGDRVTITCRASQSISDYLNWYQQKPGKAPKLLIYAASSLQSGVPSRFSGSGSGTDFTLTISSLQPEDFATYYCQQSYSTPFTFGQGTKLEIK

SEQ ID NO: 632 - protein, 107 aa, synthetic construct
  REGION 1..107: note = Description of Artificial Sequence: Synthetic polypeptide
  REGION 1..107: note = 1A7[CD28]_L1.3
DIQMTQSPSSLSASVGDRVTITCRASQSISGYLNWYQQKPGKAPKLLIYAASSLQSGVPSRFSGSGSGTDFTLTISSLQPEDFATYYCQQSYSTPFTFGQGTKLEIK

SEQ ID NO: 633 - protein, 107 aa, synthetic construct
  REGION 1..107: note = Description of Artificial Sequence: Synthetic polypeptide
  REGION 1..107: note = 1A7[CD28]_L1.4
DIQMTQSPSSLSASVGDRVTITCRASQSISHYLNWYQQKPGKAPKLLIYAASSLQSGVPSRFSGSGSGTDFTLTISSLQPEDFATYYCQQSYSTPFTFGQGTKLEIK

SEQ ID NO: 634 - protein, 107 aa, synthetic construct
  REGION 1..107: note = Description of Artificial Sequence: Synthetic polypeptide
  REGION 1..107: note = 1A7[CD28]_L1.5
DIQMTQSPSSLSASVGDRVTITCRASQSISKYLNWYQQKPGKAPKLLIYAASSLQSGVPSRFSGSGSGTDFTLTISSLQPEDFATYYCQQSYSTPFTFGQGTKLEIK

SEQ ID NO: 635 - protein, 107 aa, synthetic construct
  REGION 1..107: note = Description of Artificial Sequence: Synthetic polypeptide
  REGION 1..107: note = 1A7[CD28]_L1.6
DIQMTQSPSSLSASVGDRVTITCRASQSISNYLNWYQQKPGKAPKLLIYAASSLQSGVPSRFSGSGSGTDFTLTISSLQPEDFATYYCQQSYSTPFTFGQGTKLEIK

SEQ ID NO: 636 - protein, 107 aa, synthetic construct
  REGION 1..107: note = Description of Artificial Sequence: Synthetic polypeptide
  REGION 1..107: note = 1A7[CD28]_L1.7
DIQMTQSPSSLSASVGDRVTITCRASQSISQYLNWYQQKPGKAPKLLIYAASSLQSGVPSRFSGSGSGTDFTLTISSLQPEDFATYYCQQSYSTPFTFGQGTKLEIK

SEQ ID NO: 637 - protein, 107 aa, synthetic construct
  REGION 1..107: note = Description of Artificial Sequence: Synthetic polypeptide
  REGION 1..107: note = 1A7[CD28]_L1.8
DIQMTQSPSSLSASVGDRVTITCRASQSISTYLNWYQQKPGKAPKLLIYAASSLQSGVPSRFSGSGSGTDFTLTISSLQPEDFATYYCQQSYSTPFTFGQGTKLEIK

SEQ ID NO: 638 - protein, 107 aa, synthetic construct
  REGION 1..107: note = Description of Artificial Sequence: Synthetic polypeptide
  REGION 1..107: note = 1A7[CD28]_L1.9
DIQMTQSPSSLSASVGDRVTITCRASQSISVYLNWYQQKPGKAPKLLIYAASSLQSGVPSRFSGSGSGTDFTLTISSLQPEDFATYYCQQSYSTPFTFGQGTKLEIK

SEQ ID NO: 639 - protein, 107 aa, synthetic construct
  REGION 1..107: note = Description of Artificial Sequence: Synthetic polypeptide
  REGION 1..107: note = 1A7[CD28]_L1.10
DIQMTQSPSSLSASVGDRVTITCRASQSISYYLNWYQQKPGKAPKLLIYAASSLQSGVPSRFSGSGSGTDFTLTISSLQPEDFATYYCQQSYSTPFTFGQGTKLEIK

SEQ ID NO: 640 - protein, 107 aa, synthetic construct
  REGION 1..107: note = Description of Artificial Sequence: Synthetic polypeptide
  REGION 1..107: note = 1A7[CD28]_L1.11
DIQMTQSPSSLSASVGDRVTITCRASQSISSALNWYQQKPGKAPKLLIYAASSLQSGVPSRFSGSGSGTDFTLTISSLQPEDFATYYCQQSYSTPFTFGQGTKLEIK

SEQ ID NO: 641 - protein, 107 aa, synthetic construct
  REGION 1..107: note = Description of Artificial Sequence: Synthetic polypeptide
  REGION 1..107: note = 1A7[CD28]_L1.12
DIQMTQSPSSLSASVGDRVTITCRASQSISSDLNWYQQKPGKAPKLLIYAASSLQSGVPSRFSGSGSGTDFTLTISSLQPEDFATYYCQQSYSTPFTFGQGTKLEIK

SEQ ID NO: 642 - protein, 107 aa, synthetic construct
  REGION 1..107: note = Description of Artificial Sequence: Synthetic polypeptide
  REGION 1..107: note = 1A7[CD28]_L1.13
DIQMTQSPSSLSASVGDRVTITCRASQSISSFLNWYQQKPGKAPKLLIYAASSLQSGVPSRFSGSGSGTDFTLTISSLQPEDFATYYCQQSYSTPFTFGQGTKLEIK

SEQ ID NO: 643 - protein, 107 aa, synthetic construct
  REGION 1..107: note = Description of Artificial Sequence: Synthetic polypeptide
  REGION 1..107: note = 1A7[CD28]_L1.14
DIQMTQSPSSLSASVGDRVTITCRASQSISSHLNWYQQKPGKAPKLLIYAASSLQSGVPSRFSGSGSGTDFTLTISSLQPEDFATYYCQQSYSTPFTFGQGTKLEIK

SEQ ID NO: 644 - protein, 107 aa, synthetic construct
  REGION 1..107: note = Description of Artificial Sequence: Synthetic polypeptide
  REGION 1..107: note = 1A7[CD28]_L1.15
DIQMTQSPSSLSASVGDRVTITCRASQSISSKLNWYQQKPGKAPKLLIYAASSLQSGVPSRFSGSGSGTDFTLTISSLQPEDFATYYCQQSYSTPFTFGQGTKLEIK

SEQ ID NO: 645 - protein, 107 aa, synthetic construct
  REGION 1..107: note = Description of Artificial Sequence: Synthetic polypeptide
  REGION 1..107: note = 1A7[CD28]_L1.16
DIQMTQSPSSLSASVGDRVTITCRASQSISSLLNWYQQKPGKAPKLLIYAASSLQSGVPSRFSGSGSGTDFTLTISSLQPEDFATYYCQQSYSTPFTFGQGTKLEIK

SEQ ID NO: 646 - protein, 107 aa, synthetic construct
  REGION 1..107: note = Description of Artificial Sequence: Synthetic polypeptide
  REGION 1..107: note = 1A7[CD28]_L1.17
DIQMTQSPSSLSASVGDRVTITCRASQSISSNLNWYQQKPGKAPKLLIYAASSLQSGVPSRFSGSGSGTDFTLTISSLQPEDFATYYCQQSYSTPFTFGQGTKLEIK

SEQ ID NO: 647 - protein, 107 aa, synthetic construct
  REGION 1..107: note = Description of Artificial Sequence: Synthetic polypeptide
  REGION 1..107: note = 1A7[CD28]_L1.18
DIQMTQSPSSLSASVGDRVTITCRASQSISSQLNWYQQKPGKAPKLLIYAASSLQSGVPSRFSGSGSGTDFTLTISSLQPEDFATYYCQQSYSTPFTFGQGTKLEIK

SEQ ID NO: 648 - protein, 107 aa, synthetic construct
  REGION 1..107: note = Description of Artificial Sequence: Synthetic polypeptide
  REGION 1..107: note = 1A7[CD28]_L1.19
DIQMTQSPSSLSASVGDRVTITCRASQSISSSLNWYQQKPGKAPKLLIYAASSLQSGVPSRFSGSGSGTDFTLTISSLQPEDFATYYCQQSYSTPFTFGQGTKLEIK

SEQ ID NO: 649 - protein, 107 aa, synthetic construct
  REGION 1..107: note = Description of Artificial Sequence: Synthetic polypeptide
  REGION 1..107: note = 1A7[CD28]_L1.20
DIQMTQSPSSLSASVGDRVTITCRASQSISSWLNWYQQKPGKAPKLLIYAASSLQSGVPSRFSGSGSGTDFTLTISSLQPEDFATYYCQQSYSTPFTFGQGTKLEIK

SEQ ID NO: 650 - protein, 107 aa, synthetic construct
  REGION 1..107: note = Description of Artificial Sequence: Synthetic polypeptide
  REGION 1..107: note = 1A7[CD28]_L1.21
DIQMTQSPSSLSASVGDRVTITCRASQSISSYLAWYQQKPGKAPKLLIYAASSLQSGVPSRFSGSGSGTDFTLTISSLQPEDFATYYCQQSYSTPFTFGQGTKLEIK

SEQ ID NO: 651 - protein, 107 aa, synthetic construct
  REGION 1..107: note = Description of Artificial Sequence: Synthetic polypeptide
  REGION 1..107: note = 1A7[CD28]_L1.22
DIQMTQSPSSLSASVGDRVTITCRASQSISSYLDWYQQKPGKAPKLLIYAASSLQSGVPSRFSGSGSGTDFTLTISSLQPEDFATYYCQQSYSTPFTFGQGTKLEIK

SEQ ID NO: 652 - protein, 107 aa, synthetic construct
  REGION 1..107: note = Description of Artificial Sequence: Synthetic polypeptide
  REGION 1..107: note = 1A7[CD28]_L1.23
DIQMTQSPSSLSASVGDRVTITCRASQSISSYLGWYQQKPGKAPKLLIYAASSLQSGVPSRFSGSGSGTDFTLTISSLQPEDFATYYCQQSYSTPFTFGQGTKLEIK

SEQ ID NO: 653 - protein, 107 aa, synthetic construct
  REGION 1..107: note = Description of Artificial Sequence: Synthetic polypeptide
  REGION 1..107: note = 1A7[CD28]_L1.24
DIQMTQSPSSLSASVGDRVTITCRASQSISSYLHWYQQKPGKAPKLLIYAASSLQSGVPSRFSGSGSGTDFTLTISSLQPEDFATYYCQQSYSTPFTFGQGTKLEIK

SEQ ID NO: 654 - protein, 107 aa, synthetic construct
  REGION 1..107: note = Description of Artificial Sequence: Synthetic polypeptide
  REGION 1..107: note = 1A7[CD28]_L1.25
DIQMTQSPSSLSASVGDRVTITCRASQSISSYLQWYQQKPGKAPKLLIYAASSLQSGVPSRFSGSGSGTDFTLTISSLQPEDFATYYCQQSYSTPFTFGQGTKLEIK

SEQ ID NO: 655 - protein, 107 aa, synthetic construct
  REGION 1..107: note = Description of Artificial Sequence: Synthetic polypeptide
  REGION 1..107: note = 1A7[CD28]_L1.26
DIQMTQSPSSLSASVGDRVTITCRASQSISSYLSWYQQKPGKAPKLLIYAASSLQSGVPSRFSGSGSGTDFTLTISSLQPEDFATYYCQQSYSTPFTFGQGTKLEIK

SEQ ID NO: 656 - protein, 107 aa, synthetic construct
  REGION 1..107: note = Description of Artificial Sequence: Synthetic polypeptide
  REGION 1..107: note = 1A7[CD28]_L1.27
DIQMTQSPSSLSASVGDRVTITCRASQSISSYLTWYQQKPGKAPKLLIYAASSLQSGVPSRFSGSGSGTDFTLTISSLQPEDFATYYCQQSYSTPFTFGQGTKLEIK

SEQ ID NO: 657 - protein, 107 aa, synthetic construct
  REGION 1..107: note = Description of Artificial Sequence: Synthetic polypeptide
  REGION 1..107: note = 1A7[CD28]_L1.28
DIQMTQSPSSLSASVGDRVTITCRASQSISSYLYWYQQKPGKAPKLLIYAASSLQSGVPSRFSGSGSGTDFTLTISSLQPEDFATYYCQQSYSTPFTFGQGTKLEIK

SEQ ID NO: 658 - protein, 107 aa, synthetic construct
  REGION 1..107: note = Description of Artificial Sequence: Synthetic polypeptide
  REGION 1..107: note = 1A7[CD28]_L1.29
DIQMTQSPSSLSASVGDRVTITCRASQSISSYLNWYQQKPGKAPKLLIYDASSLQSGVPSRFSGSGSGTDFTLTISSLQPEDFATYYCQQSYSTPFTFGQGTKLEIK

SEQ ID NO: 659 - protein, 107 aa, synthetic construct
  REGION 1..107: note = Description of Artificial Sequence: Synthetic polypeptide
  REGION 1..107: note = 1A7[CD28]_L1.30
DIQMTQSPSSLSASVGDRVTITCRASQSISSYLNWYQQKPGKAPKLLIYGASSLQSGVPSRFSGSGSGTDFTLTISSLQPEDFATYYCQQSYSTPFTFGQGTKLEIK

SEQ ID NO: 660 - protein, 107 aa, synthetic construct
  REGION 1..107: note = Description of Artificial Sequence: Synthetic polypeptide
  REGION 1..107: note = 1A7[CD28]_L1.31
DIQMTQSPSSLSASVGDRVTITCRASQSISSYLNWYQQKPGKAPKLLIYKASSLQSGVPSRFSGSGSGTDFTLTISSLQPEDFATYYCQQSYSTPFTFGQGTKLEIK

SEQ ID NO: 661 - protein, 107 aa, synthetic construct
  REGION 1..107: note = Description of Artificial Sequence: Synthetic polypeptide
  REGION 1..107: note = 1A7[CD28]_L1.32
DIQMTQSPSSLSASVGDRVTITCRASQSISSYLNWYQQKPGKAPKLLIYLASSLQSGVPSRFSGSGSGTDFTLTISSLQPEDFATYYCQQSYSTPFTFGQGTKLEIK

SEQ ID NO: 662 - protein, 107 aa, synthetic construct
  REGION 1..107: note = Description of Artificial Sequence: Synthetic polypeptide
  REGION 1..107: note = 1A7[CD28]_L1.33
DIQMTQSPSSLSASVGDRVTITCRASQSISSYLNWYQQKPGKAPKLLIYQASSLQSGVPSRFSGSGSGTDFTLTISSLQPEDFATYYCQQSYSTPFTFGQGTKLEIK

SEQ ID NO: 663 - protein, 107 aa, synthetic construct
  REGION 1..107: note = Description of Artificial Sequence: Synthetic polypeptide
  REGION 1..107: note = 1A7[CD28]_L1.34
DIQMTQSPSSLSASVGDRVTITCRASQSISSYLNWYQQKPGKAPKLLIYSASSLQSGVPSRFSGSGSGTDFTLTISSLQPEDFATYYCQQSYSTPFTFGQGTKLEIK

SEQ ID NO: 664 - protein, 107 aa, synthetic construct
  REGION 1..107: note = Description of Artificial Sequence: Synthetic polypeptide
  REGION 1..107: note = 1A7[CD28]_L1.35
DIQMTQSPSSLSASVGDRVTITCRASQSISSYLNWYQQKPGKAPKLLIYTASSLQSGVPSRFSGSGSGTDFTLTISSLQPEDFATYYCQQSYSTPFTFGQGTKLEIK

SEQ ID NO: 665 - protein, 107 aa, synthetic construct
  REGION 1..107: note = Description of Artificial Sequence: Synthetic polypeptide
  REGION 1..107: note = 1A7[CD28]_L1.36
DIQMTQSPSSLSASVGDRVTITCRASQSISSYLNWYQQKPGKAPKLLIYWASSLQSGVPSRFSGSGSGTDFTLTISSLQPEDFATYYCQQSYSTPFTFGQGTKLEIK

SEQ ID NO: 666 - protein, 107 aa, synthetic construct
  REGION 1..107: note = Description of Artificial Sequence: Synthetic polypeptide
  REGION 1..107: note = 1A7[CD28]_L1.37
DIQMTQSPSSLSASVGDRVTITCRASQSISSYLNWYQQKPGKAPKLLIYYASSLQSGVPSRFSGSGSGTDFTLTISSLQPEDFATYYCQQSYSTPFTFGQGTKLEIK

SEQ ID NO: 667 - protein, 107 aa, synthetic construct
  REGION 1..107: note = Description of Artificial Sequence: Synthetic polypeptide
  REGION 1..107: note = 1A7[CD28]_L1.38
DIQMTQSPSSLSASVGDRVTITCRASQSISSYLNWYQQKPGKAPKLLIYAASALQSGVPSRFSGSGSGTDFTLTISSLQPEDFATYYCQQSYSTPFTFGQGTKLEIK

SEQ ID NO: 668 - protein, 107 aa, synthetic construct
  REGION 1..107: note = Description of Artificial Sequence: Synthetic polypeptide
  REGION 1..107: note = 1A7[CD28]_L1.39
DIQMTQSPSSLSASVGDRVTITCRASQSISSYLNWYQQKPGKAPKLLIYAASDLQSGVPSRFSGSGSGTDFTLTISSLQPEDFATYYCQQSYSTPFTFGQGTKLEIK

SEQ ID NO: 669 - protein, 107 aa, synthetic construct
  REGION 1..107: note = Description of Artificial Sequence: Synthetic polypeptide
  REGION 1..107: note = 1A7[CD28]_L1.40
DIQMTQSPSSLSASVGDRVTITCRASQSISSYLNWYQQKPGKAPKLLIYAASKLQSGVPSRFSGSGSGTDFTLTISSLQPEDFATYYCQQSYSTPFTFGQGTKLEIK

SEQ ID NO: 670 - protein, 107 aa, synthetic construct
  REGION 1..107: note = Description of Artificial Sequence: Synthetic polypeptide
  REGION 1..107: note = 1A7[CD28]_L1.41
DIQMTQSPSSLSASVGDRVTITCRASQSISSYLNWYQQKPGKAPKLLIYAASNLQSGVPSRFSGSGSGTDFTLTISSLQPEDFATYYCQQSYSTPFTFGQGTKLEIK

SEQ ID NO: 671 - protein, 107 aa, synthetic construct
  REGION 1..107: note = Description of Artificial Sequence: Synthetic polypeptide
  REGION 1..107: note = 1A7[CD28]_L1.42
DIQMTQSPSSLSASVGDRVTITCRASQSISSYLNWYQQKPGKAPKLLIYAASQLQSGVPSRFSGSGSGTDFTLTISSLQPEDFATYYCQQSYSTPFTFGQGTKLEIK

SEQ ID NO: 672 - protein, 107 aa, synthetic construct
  REGION 1..107: note = Description of Artificial Sequence: Synthetic polypeptide
  REGION 1..107: note = 1A7[CD28]_L1.43
DIQMTQSPSSLSASVGDRVTITCRASQSISSYLNWYQQKPGKAPKLLIYAASTLQSGVPSRFSGSGSGTDFTLTISSLQPEDFATYYCQQSYSTPFTFGQGTKLEIK

SEQ ID NO: 673 - protein, 107 aa, synthetic construct
  REGION 1..107: note = Description of Artificial Sequence: Synthetic polypeptide
  REGION 1..107: note = 1A7[CD28]_L1.44
DIQMTQSPSSLSASVGDRVTITCRASQSISSYLNWYQQKPGKAPKLLIYAASYLQSGVPSRFSGSGSGTDFTLTISSLQPEDFATYYCQQSYSTPFTFGQGTKLEIK

SEQ ID NO: 674 - protein, 107 aa, synthetic construct
  REGION 1..107: note = Description of Artificial Sequence: Synthetic polypeptide
  REGION 1..107: note = 1A7[CD28]_L1.45
DIQMTQSPSSLSASVGDRVTITCRASQSISSYLNWYQQKPGKAPKLLIYAASSLASGVPSRFSGSGSGTDFTLTISSLQPEDFATYYCQQSYSTPFTFGQGTKLEIK

SEQ ID NO: 675 - protein, 107 aa, synthetic construct
  REGION 1..107: note = Description of Artificial Sequence: Synthetic polypeptide
  REGION 1..107: note = 1A7[CD28]_L1.46
DIQMTQSPSSLSASVGDRVTITCRASQSISSYLNWYQQKPGKAPKLLIYAASSLESGVPSRFSGSGSGTDFTLTISSLQPEDFATYYCQQSYSTPFTFGQGTKLEIK

SEQ ID NO: 676 - protein, 107 aa, synthetic construct
  REGION 1..107: note = Description of Artificial Sequence: Synthetic polypeptide
  REGION 1..107: note = 1A7[CD28]_L1.47
DIQMTQSPSSLSASVGDRVTITCRASQSISSYLNWYQQKPGKAPKLLIYAASSLFSGVPSRFSGSGSGTDFTLTISSLQPEDFATYYCQQSYSTPFTFGQGTKLEIK

SEQ ID NO: 677 - protein, 107 aa, synthetic construct
  REGION 1..107: note = Description of Artificial Sequence: Synthetic polypeptide
  REGION 1..107: note = 1A7[CD28]_L1.48
DIQMTQSPSSLSASVGDRVTITCRASQSISSYLNWYQQKPGKAPKLLIYAASSLHSGVPSRFSGSGSGTDFTLTISSLQPEDFATYYCQQSYSTPFTFGQGTKLEIK

SEQ ID NO: 678 - protein, 107 aa, synthetic construct
  REGION 1..107: note = Description of Artificial Sequence: Synthetic polypeptide
  REGION 1..107: note = 1A7[CD28]_L1.49
DIQMTQSPSSLSASVGDRVTITCRASQSISSYLNWYQQKPGKAPKLLIYAASSLISGVPSRFSGSGSGTDFTLTISSLQPEDFATYYCQQSYSTPFTFGQGTKLEIK

SEQ ID NO: 679 - protein, 107 aa, synthetic construct
  REGION 1..107: note = Description of Artificial Sequence: Synthetic polypeptide
  REGION 1..107: note = 1A7[CD28]_L1.50
DIQMTQSPSSLSASVGDRVTITCRASQSISSYLNWYQQKPGKAPKLLIYAASSLKSGVPSRFSGSGSGTDFTLTISSLQPEDFATYYCQQSYSTPFTFGQGTKLEIK

SEQ ID NO: 680 - protein, 107 aa, synthetic construct
  REGION 1..107: note = Description of Artificial Sequence: Synthetic polypeptide
  REGION 1..107: note = 1A7[CD28]_L1.51
DIQMTQSPSSLSASVGDRVTITCRASQSISSYLNWYQQKPGKAPKLLIYAASSLNSGVPSRFSGSGSGTDFTLTISSLQPEDFATYYCQQSYSTPFTFGQGTKLEIK

SEQ ID NO: 681 - protein, 107 aa, synthetic construct
  REGION 1..107: note = Description of Artificial Sequence: Synthetic polypeptide
  REGION 1..107: note = 1A7[CD28]_L1.52
DIQMTQSPSSLSASVGDRVTITCRASQSISSYLNWYQQKPGKAPKLLIYAASSLSSGVPSRFSGSGSGTDFTLTISSLQPEDFATYYCQQSYSTPFTFGQGTKLEIK

SEQ ID NO: 682 - protein, 107 aa, synthetic construct
  REGION 1..107: note = Description of Artificial Sequence: Synthetic polypeptide
  REGION 1..107: note = 1A7[CD28]_L1.53
DIQMTQSPSSLSASVGDRVTITCRASQSISSYLNWYQQKPGKAPKLLIYAASSLVSGVPSRFSGSGSGTDFTLTISSLQPEDFATYYCQQSYSTPFTFGQGTKLEIK

SEQ ID NO: 683 - protein, 107 aa, synthetic construct
  REGION 1..107: note = Description of Artificial Sequence: Synthetic polypeptide
  REGION 1..107: note = 1A7[CD28]_L1.54
DIQMTQSPSSLSASVGDRVTITCRASQSISSYLNWYQQKPGKAPKLLIYAASSLYSGVPSRFSGSGSGTDFTLTISSLQPEDFATYYCQQSYSTPFTFGQGTKLEIK

SEQ ID NO: 684 - protein, 107 aa, synthetic construct
  REGION 1..107: note = Description of Artificial Sequence: Synthetic polypeptide
  REGION 1..107: note = 1A7[CD28]_L1.55
DIQMTQSPSSLSASVGDRVTITCRASQSISSYLNWYQQKPGKAPKLLIYAASSLQAGVPSRFSGSGSGTDFTLTISSLQPEDFATYYCQQSYSTPFTFGQGTKLEIK

SEQ ID NO: 685 - protein, 107 aa, synthetic construct
  REGION 1..107: note = Description of Artificial Sequence: Synthetic polypeptide
  REGION 1..107: note = 1A7[CD28]_L1.56
DIQMTQSPSSLSASVGDRVTITCRASQSISSYLNWYQQKPGKAPKLLIYAASSLQDGVPSRFSGSGSGTDFTLTISSLQPEDFATYYCQQSYSTPFTFGQGTKLEIK

SEQ ID NO: 686 - protein, 107 aa, synthetic construct
  REGION 1..107: note = Description of Artificial Sequence: Synthetic polypeptide
  REGION 1..107: note = 1A7[CD28]_L1.57
DIQMTQSPSSLSASVGDRVTITCRASQSISSYLNWYQQKPGKAPKLLIYAASSLQGGVPSRFSGSGSGTDFTLTISSLQPEDFATYYCQQSYSTPFTFGQGTKLEIK

SEQ ID NO: 687 - protein, 107 aa, synthetic construct
  REGION 1..107: note = Description of Artificial Sequence: Synthetic polypeptide
  REGION 1..107: note = 1A7[CD28]_L1.58
DIQMTQSPSSLSASVGDRVTITCRASQSISSYLNWYQQKPGKAPKLLIYAASSLQHGVPSRFSGSGSGTDFTLTISSLQPEDFATYYCQQSYSTPFTFGQGTKLEIK

SEQ ID NO: 688 - protein, 107 aa, synthetic construct
  REGION 1..107: note = Description of Artificial Sequence: Synthetic polypeptide
  REGION 1..107: note = 1A7[CD28]_L1.59
DIQMTQSPSSLSASVGDRVTITCRASQSISSYLNWYQQKPGKAPKLLIYAASSLQKGVPSRFSGSGSGTDFTLTISSLQPEDFATYYCQQSYSTPFTFGQGTKLEIK

SEQ ID NO: 689 - protein, 107 aa, synthetic construct
  REGION 1..107: note = Description of Artificial Sequence: Synthetic polypeptide
  REGION 1..107: note = 1A7[CD28]_L1.60
DIQMTQSPSSLSASVGDRVTITCRASQSISSYLNWYQQKPGKAPKLLIYAASSLQQGVPSRFSGSGSGTDFTLTISSLQPEDFATYYCQQSYSTPFTFGQGTKLEIK

SEQ ID NO: 690 - protein, 107 aa, synthetic construct
  REGION 1..107: note = Description of Artificial Sequence: Synthetic polypeptide
  REGION 1..107: note = 1A7[CD28]_L1.61
DIQMTQSPSSLSASVGDRVTITCRASQSISSYLNWYQQKPGKAPKLLIYAASSLQTGVPSRFSGSGSGTDFTLTISSLQPEDFATYYCQQSYSTPFTFGQGTKLEIK

SEQ ID NO: 691 - protein, 107 aa, synthetic construct
  REGION 1..107: note = Description of Artificial Sequence: Synthetic polypeptide
  REGION 1..107: note = 1A7[CD28]_L1.62
DIQMTQSPSSLSASVGDRVTITCRASQSISSYLNWYQQKPGKAPKLLIYAASSLQVGVPSRFSGSGSGTDFTLTISSLQPEDFATYYCQQSYSTPFTFGQGTKLEIK

SEQ ID NO: 692 - protein, 107 aa, synthetic construct
  REGION 1..107: note = Description of Artificial Sequence: Synthetic polypeptide
  REGION 1..107: note = 1A7[CD28]_L1.63
DIQMTQSPSSLSASVGDRVTITCRASQSISSYLNWYQQKPGKAPKLLIYAASSLQYGVPSRFSGSGSGTDFTLTISSLQPEDFATYYCQQSYSTPFTFGQGTKLEIK

SEQ ID NO: 693 - protein, 107 aa, synthetic construct
  REGION 1..107: note = Description of Artificial Sequence: Synthetic polypeptide
  REGION 1..107: note = 1A7[CD28]_L1.64
DIQMTQSPSSLSASVGDRVTITCRASQSISSYLNWYQQKPGKAPKLLIYAASSLQSGVPSRFSGSGSGTDFTLTISSLQPEDFATYYCQQAYSTPFTFGQGTKLEIK

SEQ ID NO: 694 - protein, 107 aa, synthetic construct
  REGION 1..107: note = Description of Artificial Sequence: Synthetic polypeptide
  REGION 1..107: note = 1A7[CD28]_L1.65
DIQMTQSPSSLSASVGDRVTITCRASQSISSYLNWYQQKPGKAPKLLIYAASSLQSGVPSRFSGSGSGTDFTLTISSLQPEDFATYYCQQDYSTPFTFGQGTKLEIK

SEQ ID NO: 695 - protein, 107 aa, synthetic construct
  REGION 1..107: note = Description of Artificial Sequence: Synthetic polypeptide
  REGION 1..107: note = 1A7[CD28]_L1.66
DIQMTQSPSSLSASVGDRVTITCRASQSISSYLNWYQQKPGKAPKLLIYAASSLQSGVPSRFSGSGSGTDFTLTISSLQPEDFATYYCQQFYSTPFTFGQGTKLEIK

SEQ ID NO: 696 - protein, 107 aa, synthetic construct
  REGION 1..107: note = Description of Artificial Sequence: Synthetic polypeptide
  REGION 1..107: note = 1A7[CD28]_L1.67
DIQMTQSPSSLSASVGDRVTITCRASQSISSYLNWYQQKPGKAPKLLIYAASSLQSGVPSRFSGSGSGTDFTLTISSLQPEDFATYYCQQHYSTPFTFGQGTKLEIK

SEQ ID NO: 697 - protein, 107 aa, synthetic construct
  REGION 1..107: note = Description of Artificial Sequence: Synthetic polypeptide
  REGION 1..107: note = 1A7[CD28]_L1.68
DIQMTQSPSSLSASVGDRVTITCRASQSISSYLNWYQQKPGKAPKLLIYAASSLQSGVPSRFSGSGSGTDFTLTISSLQPEDFATYYCQQKYSTPFTFGQGTKLEIK

SEQ ID NO: 698 - protein, 107 aa, synthetic construct
  REGION 1..107: note = Description of Artificial Sequence: Synthetic polypeptide
  REGION 1..107: note = 1A7[CD28]_L1.69
DIQMTQSPSSLSASVGDRVTITCRASQSISSYLNWYQQKPGKAPKLLIYAASSLQSGVPSRFSGSGSGTDFTLTISSLQPEDFATYYCQQLYSTPFTFGQGTKLEIK

SEQ ID NO: 699 - protein, 107 aa, synthetic construct
  REGION 1..107: note = Description of Artificial Sequence: Synthetic polypeptide
  REGION 1..107: note = 1A7[CD28]_L1.70
DIQMTQSPSSLSASVGDRVTITCRASQSISSYLNWYQQKPGKAPKLLIYAASSLQSGVPSRFSGSGSGTDFTLTISSLQPEDFATYYCQQTYSTPFTFGQGTKLEIK

SEQ ID NO: 700 - protein, 107 aa, synthetic construct
  REGION 1..107: note = Description of Artificial Sequence: Synthetic polypeptide
  REGION 1..107: note = 1A7[CD28]_L1.71
DIQMTQSPSSLSASVGDRVTITCRASQSISSYLNWYQQKPGKAPKLLIYAASSLQSGVPSRFSGSGSGTDFTLTISSLQPEDFATYYCQQVYSTPFTFGQGTKLEIK

SEQ ID NO: 701 - protein, 107 aa, synthetic construct
  REGION 1..107: note = Description of Artificial Sequence: Synthetic polypeptide
  REGION 1..107: note = 1A7[CD28]_L1.72
DIQMTQSPSSLSASVGDRVTITCRASQSISSYLNWYQQKPGKAPKLLIYAASSLQSGVPSRFSGSGSGTDFTLTISSLQPEDFATYYCQQYYSTPFTFGQGTKLEIK

SEQ ID NO: 702 - protein, 107 aa, synthetic construct
  REGION 1..107: note = Description of Artificial Sequence: Synthetic polypeptide
  REGION 1..107: note = 1A7[CD28]_L1.73
DIQMTQSPSSLSASVGDRVTITCRASQSISSYLNWYQQKPGKAPKLLIYAASSLQSGVPSRFSGSGSGTDFTLTISSLQPEDFATYYCQQSASTPFTFGQGTKLEIK

SEQ ID NO: 703 - protein, 107 aa, synthetic construct
  REGION 1..107: note = Description of Artificial Sequence: Synthetic polypeptide
  REGION 1..107: note = 1A7[CD28]_L1.74
DIQMTQSPSSLSASVGDRVTITCRASQSISSYLNWYQQKPGKAPKLLIYAASSLQSGVPSRFSGSGSGTDFTLTISSLQPEDFATYYCQQSDSTPFTFGQGTKLEIK

SEQ ID NO: 704 - protein, 107 aa, synthetic construct
  REGION 1..107: note = Description of Artificial Sequence: Synthetic polypeptide
  REGION 1..107: note = 1A7[CD28]_L1.75
DIQMTQSPSSLSASVGDRVTITCRASQSISSYLNWYQQKPGKAPKLLIYAASSLQSGVPSRFSGSGSGTDFTLTISSLQPEDFATYYCQQSFSTPFTFGQGTKLEIK

SEQ ID NO: 705 - protein, 107 aa, synthetic construct
  REGION 1..107: note = Description of Artificial Sequence: Synthetic polypeptide
  REGION 1..107: note = 1A7[CD28]_L1.76
DIQMTQSPSSLSASVGDRVTITCRASQSISSYLNWYQQKPGKAPKLLIYAASSLQSGVPSRFSGSGSGTDFTLTISSLQPEDFATYYCQQSHSTPFTFGQGTKLEIK

SEQ ID NO: 706 - protein, 107 aa, synthetic construct
  REGION 1..107: note = Description of Artificial Sequence: Synthetic polypeptide
  REGION 1..107: note = 1A7[CD28]_L1.77
DIQMTQSPSSLSASVGDRVTITCRASQSISSYLNWYQQKPGKAPKLLIYAASSLQSGVPSRFSGSGSGTDFTLTISSLQPEDFATYYCQQSKSTPFTFGQGTKLEIK

SEQ ID NO: 707 - protein, 107 aa, synthetic construct
  REGION 1..107: note = Description of Artificial Sequence: Synthetic polypeptide
  REGION 1..107: note = 1A7[CD28]_L1.78
DIQMTQSPSSLSASVGDRVTITCRASQSISSYLNWYQQKPGKAPKLLIYAASSLQSGVPSRFSGSGSGTDFTLTISSLQPEDFATYYCQQSLSTPFTFGQGTKLEIK

SEQ ID NO: 708 - protein, 107 aa, synthetic construct
  REGION 1..107: note = Description of Artificial Sequence: Synthetic polypeptide
  REGION 1..107: note = 1A7[CD28]_L1.79
DIQMTQSPSSLSASVGDRVTITCRASQSISSYLNWYQQKPGKAPKLLIYAASSLQSGVPSRFSGSGSGTDFTLTISSLQPEDFATYYCQQSQSTPFTFGQGTKLEIK

SEQ ID NO: 709 - protein, 107 aa, synthetic construct
  REGION 1..107: note = Description of Artificial Sequence: Synthetic polypeptide
  REGION 1..107: note = 1A7[CD28]_L1.80
DIQMTQSPSSLSASVGDRVTITCRASQSISSYLNWYQQKPGKAPKLLIYAASSLQSGVPSRFSGSGSGTDFTLTISSLQPEDFATYYCQQSVSTPFTFGQGTKLEIK

SEQ ID NO: 710 - protein, 107 aa, synthetic construct
  REGION 1..107: note = Description of Artificial Sequence: Synthetic polypeptide
  REGION 1..107: note = 1A7[CD28]_L1.81
DIQMTQSPSSLSASVGDRVTITCRASQSISSYLNWYQQKPGKAPKLLIYAASSLQSGVPSRFSGSGSGTDFTLTISSLQPEDFATYYCQQSWSTPFTFGQGTKLEIK

SEQ ID NO: 711 - protein, 107 aa, synthetic construct
  REGION 1..107: note = Description of Artificial Sequence: Synthetic polypeptide
  REGION 1..107: note = 1A7[CD28]_L1.82
DIQMTQSPSSLSASVGDRVTITCRASQSISSYLNWYQQKPGKAPKLLIYAASSLQSGVPSRFSGSGSGTDFTLTISSLQPEDFATYYCQQSYATPFTFGQGTKLEIK

SEQ ID NO: 712 - protein, 107 aa, synthetic construct
  REGION 1..107: note = Description of Artificial Sequence: Synthetic polypeptide
  REGION 1..107: note = 1A7[CD28]_L1.83
DIQMTQSPSSLSASVGDRVTITCRASQSISSYLNWYQQKPGKAPKLLIYAASSLQSGVPSRFSGSGSGTDFTLTISSLQPEDFATYYCQQSYDTPFTFGQGTKLEIK

SEQ ID NO: 713 - protein, 107 aa, synthetic construct
  REGION 1..107: note = Description of Artificial Sequence: Synthetic polypeptide
  REGION 1..107: note = 1A7[CD28]_L1.84
DIQMTQSPSSLSASVGDRVTITCRASQSISSYLNWYQQKPGKAPKLLIYAASSLQSGVPSRFSGSGSGTDFTLTISSLQPEDFATYYCQQSYGTPFTFGQGTKLEIK

SEQ ID NO: 714 - protein, 107 aa, synthetic construct
  REGION 1..107: note = Description of Artificial Sequence: Synthetic polypeptide
  REGION 1..107: note = 1A7[CD28]_L1.85
DIQMTQSPSSLSASVGDRVTITCRASQSISSYLNWYQQKPGKAPKLLIYAASSLQSGVPSRFSGSGSGTDFTLTISSLQPEDFATYYCQQSYHTPFTFGQGTKLEIK

SEQ ID NO: 715 - protein, 107 aa, synthetic construct
  REGION 1..107: note = Description of Artificial Sequence: Synthetic polypeptide
  REGION 1..107: note = 1A7[CD28]_L1.86
DIQMTQSPSSLSASVGDRVTITCRASQSISSYLNWYQQKPGKAPKLLIYAASSLQSGVPSRFSGSGSGTDFTLTISSLQPEDFATYYCQQSYKTPFTFGQGTKLEIK

SEQ ID NO: 716 - protein, 107 aa, synthetic construct
  REGION 1..107: note = Description of Artificial Sequence: Synthetic polypeptide
  REGION 1..107: note = 1A7[CD28]_L1.87
DIQMTQSPSSLSASVGDRVTITCRASQSISSYLNWYQQKPGKAPKLLIYAASSLQSGVPSRFSGSGSGTDFTLTISSLQPEDFATYYCQQSYNTPFTFGQGTKLEIK

SEQ ID NO: 717 - protein, 107 aa, synthetic construct
  REGION 1..107: note = Description of Artificial Sequence: Synthetic polypeptide
  REGION 1..107: note = 1A7[CD28]_L1.88
DIQMTQSPSSLSASVGDRVTITCRASQSISSYLNWYQQKPGKAPKLLIYAASSLQSGVPSRFSGSGSGTDFTLTISSLQPEDFATYYCQQSYQTPFTFGQGTKLEIK

SEQ ID NO: 718 - protein, 107 aa, synthetic construct
  REGION 1..107: note = Description of Artificial Sequence: Synthetic polypeptide
  REGION 1..107: note = 1A7[CD28]_L1.89
DIQMTQSPSSLSASVGDRVTITCRASQSISSYLNWYQQKPGKAPKLLIYAASSLQSGVPSRFSGSGSGTDFTLTISSLQPEDFATYYCQQSYTTPFTFGQGTKLEIK

SEQ ID NO: 719 - protein, 107 aa, synthetic construct
  REGION 1..107: note = Description of Artificial Sequence: Synthetic polypeptide
  REGION 1..107: note = 1A7[CD28]_L1.90
DIQMTQSPSSLSASVGDRVTITCRASQSISSYLNWYQQKPGKAPKLLIYAASSLQSGVPSRFSGSGSGTDFTLTISSLQPEDFATYYCQQSYVTPFTFGQGTKLEIK

SEQ ID NO: 720 - protein, 107 aa, synthetic construct
  REGION 1..107: note = Description of Artificial Sequence: Synthetic polypeptide
  REGION 1..107: note = 1A7[CD28]_L1.91
DIQMTQSPSSLSASVGDRVTITCRASQSISSYLNWYQQKPGKAPKLLIYAASSLQSGVPSRFSGSGSGTDFTLTISSLQPEDFATYYCQQSYYTPFTFGQGTKLEIK

SEQ ID NO: 721 - protein, 107 aa, synthetic construct
  REGION 1..107: note = Description of Artificial Sequence: Synthetic polypeptide
  REGION 1..107: note = 1A7[CD28]_L1.92
DIQMTQSPSSLSASVGDRVTITCRASQSISSYLNWYQQKPGKAPKLLIYAASSLQSGVPSRFSGSGSGTDFTLTISSLQPEDFATYYCQQSYSAPFTFGQGTKLEIK

SEQ ID NO: 722 - protein, 107 aa, synthetic construct
  REGION 1..107: note = Description of Artificial Sequence: Synthetic polypeptide
  REGION 1..107: note = 1A7[CD28]_L1.93
DIQMTQSPSSLSASVGDRVTITCRASQSISSYLNWYQQKPGKAPKLLIYAASSLQSGVPSRFSGSGSGTDFTLTISSLQPEDFATYYCQQSYSDPFTFGQGTKLEIK

SEQ ID NO: 723 - protein, 107 aa, synthetic construct
  REGION 1..107: note = Description of Artificial Sequence: Synthetic polypeptide
  REGION 1..107: note = 1A7[CD28]_L1.94
DIQMTQSPSSLSASVGDRVTITCRASQSISSYLNWYQQKPGKAPKLLIYAASSLQSGVPSRFSGSGSGTDFTLTISSLQPEDFATYYCQQSYSFPFTFGQGTKLEIK

SEQ ID NO: 724 - protein, 107 aa, synthetic construct
  REGION 1..107: note = Description of Artificial Sequence: Synthetic polypeptide
  REGION 1..107: note = 1A7[CD28]_L1.95
DIQMTQSPSSLSASVGDRVTITCRASQSISSYLNWYQQKPGKAPKLLIYAASSLQSGVPSRFSGSGSGTDFTLTISSLQPEDFATYYCQQSYSIPFTFGQGTKLEIK

SEQ ID NO: 725 - protein, 107 aa, synthetic construct
  REGION 1..107: note = Description of Artificial Sequence: Synthetic polypeptide
  REGION 1..107: note = 1A7[CD28]_L1.96
DIQMTQSPSSLSASVGDRVTITCRASQSISSYLNWYQQKPGKAPKLLIYAASSLQSGVPSRFSGSGSGTDFTLTISSLQPEDFATYYCQQSYSKPFTFGQGTKLEIK

SEQ ID NO: 726 - protein, 107 aa, synthetic construct
  REGION 1..107: note = Description of Artificial Sequence: Synthetic polypeptide
  REGION 1..107: note = 1A7[CD28]_L1.97
DIQMTQSPSSLSASVGDRVTITCRASQSISSYLNWYQQKPGKAPKLLIYAASSLQSGVPSRFSGSGSGTDFTLTISSLQPEDFATYYCQQSYSLPFTFGQGTKLEIK

SEQ ID NO: 727 - protein, 107 aa, synthetic construct
  REGION 1..107: note = Description of Artificial Sequence: Synthetic polypeptide
  REGION 1..107: note = 1A7[CD28]_L1.98
DIQMTQSPSSLSASVGDRVTITCRASQSISSYLNWYQQKPGKAPKLLIYAASSLQSGVPSRFSGSGSGTDFTLTISSLQPEDFATYYCQQSYSQPFTFGQGTKLEIK

SEQ ID NO: 728 - protein, 107 aa, synthetic construct
  REGION 1..107: note = Description of Artificial Sequence: Synthetic polypeptide
  REGION 1..107: note = 1A7[CD28]_L1.99
DIQMTQSPSSLSASVGDRVTITCRASQSISSYLNWYQQKPGKAPKLLIYAASSLQSGVPSRFSGSGSGTDFTLTISSLQPEDFATYYCQQSYSSPFTFGQGTKLEIK

SEQ ID NO: 729 - protein, 107 aa, synthetic construct
  REGION 1..107: note = Description of Artificial Sequence: Synthetic polypeptide
  REGION 1..107: note = 1A7[CD28]_L1.100
DIQMTQSPSSLSASVGDRVTITCRASQSISSYLNWYQQKPGKAPKLLIYAASSLQSGVPSRFSGSGSGTDFTLTISSLQPEDFATYYCQQSYSVPFTFGQGTKLEIK

SEQ ID NO: 730 - protein, 107 aa, synthetic construct
  REGION 1..107: note = Description of Artificial Sequence: Synthetic polypeptide
  REGION 1..107: note = 1A7[CD28]_L1.101
DIQMTQSPSSLSASVGDRVTITCRASQSISSYLNWYQQKPGKAPKLLIYAASSLQSGVPSRFSGSGSGTDFTLTISSLQPEDFATYYCQQSYSYPFTFGQGTKLEIK

SEQ ID NO: 731 - protein, 107 aa, synthetic construct
  REGION 1..107: note = Description of Artificial Sequence: Synthetic polypeptide
  REGION 1..107: note = 1A7[CD28]_L1.102
DIQMTQSPSSLSASVGDRVTITCRASQSISSYLNWYQQKPGKAPKLLIYAASSLQSGVPSRFSGSGSGTDFTLTISSLQPEDFATYYCQQSYSTPITFGQGTKLEIK

SEQ ID NO: 732 - protein, 107 aa, synthetic construct
  REGION 1..107: note = Description of Artificial Sequence: Synthetic polypeptide
  REGION 1..107: note = 1A7[CD28]_L1.103
DIQMTQSPSSLSASVGDRVTITCRASQSISSYLNWYQQKPGKAPKLLIYAASSLQSGVPSRFSGSGSGTDFTLTISSLQPEDFATYYCQQSYSTPLTFGQGTKLEIK

SEQ ID NO: 733 - protein, 107 aa, synthetic construct
  REGION 1..107: note = Description of Artificial Sequence: Synthetic polypeptide
  REGION 1..107: note = 1A7[CD28]_L1.104
DIQMTQSPSSLSASVGDRVTITCRASQSISSYLNWYQQKPGKAPKLLIYAASSLQSGVPSRFSGSGSGTDFTLTISSLQPEDFATYYCQQSYSTPWTFGQGTKLEIK

SEQ ID NO: 734 - protein, 107 aa, synthetic construct
  REGION 1..107: note = Description of Artificial Sequence: Synthetic polypeptide
  REGION 1..107: note = 1A7[CD28]_L1.105
DIQMTQSPSSLSASVGDRVTITCRASQSISSYLTWYQQKPGKAPKLLIYAASSLQSGVPSRFSGSGSGTDFTLTISSLQPEDFATYYCQQVYSTPFTFGQGTKLEIK

SEQ ID NO: 735 - protein, 107 aa, synthetic construct
  REGION 1..107: note = Description of Artificial Sequence: Synthetic polypeptide
  REGION 1..107: note = 1A7[CD28]_L1.106
DIQMTQSPSSLSASVGDRVTITCRASQSISSYLTWYQQKPGKAPKLLIYAASSLQSGVPSRFSGSGSGTDFTLTISSLQPEDFATYYCQQSYNTPFTFGQGTKLEIK

SEQ ID NO: 736 - protein, 118 aa, synthetic construct
  REGION 1..118: note = Description of Artificial Sequence: Synthetic polypeptide
  REGION 1..118: note = 2G4[PD-L1]_H1.1
EVQLLESGGGLVQPGGSLRLSCAASGFTFPSRDMSWVRQAPGKRLEWVSTISSGGSFTHYPDSVKGRFTISRDNSKNTLYLQMNSLRAEDTAVYYCVRRSGDWYFDVWGAGTTVTVSS

SEQ ID NO: 737 - protein, 118 aa, synthetic construct
  REGION 1..118: note = Description of Artificial Sequence: Synthetic polypeptide
  REGION 1..118: note = 2G4[PD-L1]_H1.2
EVQLLESGGGLVQPGGSLRLSCAASGFTFSQKDMSWVRQAPGKRLEWVSTISSGGSFTHYPDSVKGRFTISRDNSKNTLYLQMNSLRAEDTAVYYCVRRSGDWYFDVWGAGTTVTVSS

SEQ ID NO: 738 - protein, 118 aa, synthetic construct
  REGION 1..118: note = Description of Artificial Sequence: Synthetic polypeptide
  REGION 1..118: note = 2G4[PD-L1]_H1.3
EVQLLESGGGLVQPGGSLRLSCAASGFTFSSYDMSWVRQAPGKRLEWVSTISSGGSFTHYPDSVKGRFTISRDNSKNTLYLQMNSLRAEDTAVYYCVRRSLDWYFDVWGAGTTVTVSS

SEQ ID NO: 739 - protein, 118 aa, synthetic construct
  REGION 1..118: note = Description of Artificial Sequence: Synthetic polypeptide
  REGION 1..118: note = 2G4[PD-L1]_H1.4
EVQLLESGGGLVQPGGSLRLSCAASGFTFSSYDMSWVRQAPGKRLEWVSTISSGGSFTHYPDSVKGRFTISRDNSKNTLYLQMNSLRAEDTAVYYCARRSLDWYFDVWGAGTTVTVSS

SEQ ID NO: 740 - protein, 118 aa, synthetic construct
  REGION 1..118: note = Description of Artificial Sequence: Synthetic polypeptide
  REGION 1..118: note = 2G4[PD-L1]_H1.5
EVQLLESGGGLVQPGGSLRLSCAASGFTFRSYDMSWVRQAPGKRLEWVSTISSGGSFTHYPDSVKGRFTISRDNSKNTLYLQMNSLRAEDTAVYYCVRRSGDWYFDVWGAGTTVTVSS

SEQ ID NO: 741 - protein, 118 aa, synthetic construct
  REGION 1..118: note = Description of Artificial Sequence: Synthetic polypeptide
  REGION 1..118: note = 2G4[PD-L1]_H1.6
EVQLLESGGGLVQPGGSLRLSCAASGFTFHSRDMSWVRQAPGKRLEWVSTISSGGRFTHYPDSVKGRFTISRDNSKNTLYLQMNSLRAEDTAVYYCVRRSGDWYFDVWGAGTTVTVSS

SEQ ID NO: 742 - protein, 118 aa, synthetic construct
  REGION 1..118: note = Description of Artificial Sequence: Synthetic polypeptide
  REGION 1..118: note = 2G4[PD-L1]_H1.7
EVQLLESGGGLVQPGGSLRLSCAASGFTFSSYDMSWVRQAPGKRLEWVSTISSGGSFTHYPDSVKGRFTISRDNSKNTLYLQMNSLRAEDTAVYYCVRRSSDWYFDVWGAGTTVTVSS

SEQ ID NO: 743 - protein, 118 aa, synthetic construct
  REGION 1..118: note = Description of Artificial Sequence: Synthetic polypeptide
  REGION 1..118: note = 2G4[PD-L1]_H1.8
EVQLLESGGGLVQPGGSLRLSCAASGFTFSSSDMSWVRQAPGKRLEWVSTISSGGSFTHYPDSVKGRFTISRDNSKNTLYLQMNSLRAEDTAVYYCVRRSGDWYFDVWGAGTTVTVSS

SEQ ID NO: 744 - protein, 118 aa, synthetic construct
  REGION 1..118: note = Description of Artificial Sequence: Synthetic polypeptide
  REGION 1..118: note = 2G4[PD-L1]_H1.9
EVQLLESGGGLVQPGGSLRLSCAASGFTFSFRDMSWVRQAPGKRLEWVSTISSGGSFTHYPDSVKGRFTISRDNSKNTLYLQMNSLRAEDTAVYYCVRRSGDWYFDVWGAGTTVTVSS

SEQ ID NO: 745 - protein, 118 aa, synthetic construct
  REGION 1..118: note = Description of Artificial Sequence: Synthetic polypeptide
  REGION 1..118: note = 2G4[PD-L1]_H1.10
EVQLLESGGGLVQPGGSLRLSCAASGFTFSWYDMSWVRQAPGKRLEWVSTISSGGSFTHYPDSVKGRFTISRDNSKNTLYLQMNSLRAEDTAVYYCVRRSGDWYFDVWGAGTTVTVSS

SEQ ID NO: 746 - protein, 118 aa, synthetic construct
  REGION 1..118: note = Description of Artificial Sequence: Synthetic polypeptide
  REGION 1..118: note = 2G4[PD-L1]_H1.11
EVQLLESGGGLVQPGGSLRLSCAASGFTFSVYDMSWVRQAPGKRLEWVSTISSGGSFTHYPDSVKGRFTISRDNSKNTLYLQMNSLRAEDTAVYYCVRRSGDWYFDVWGAGTTVTVSS

SEQ ID NO: 747 - protein, 118 aa, synthetic construct
  REGION 1..118: note = Description of Artificial Sequence: Synthetic polypeptide
  REGION 1..118: note = 2G4[PD-L1]_H1.12
EVQLLESGGGLVQPGGSLRLSCAASGFTFSVYDMSWVRQAPGKRLEWVSTISSGGSFTHYPDSVKGRFTISRDNSKNTLYLQMNSLRAEDTAVYYCVRRSLDWYFDVWGAGTTVTVSS

SEQ ID NO: 748 - protein, 118 aa, synthetic construct
  REGION 1..118: note = Description of Artificial Sequence: Synthetic polypeptide
  REGION 1..118: note = 2G4[PD-L1]_H1.13
EVQLLESGGGLVQPGGSLRLSCAASGFTFSSKDMSWVRQAPGKRLEWVSTISSGGSFTHYPDSVKGRFTISRDNSKNTLYLQMNSLRAEDTAVYYCVRRSGDWYFDVWGAGTTVTVSS

SEQ ID NO: 749 - protein, 118 aa, synthetic construct
  REGION 1..118: note = Description of Artificial Sequence: Synthetic polypeptide
  REGION 1..118: note = 2G4[PD-L1]_H1.14
EVQLLESGGGLVQPGGSLRLSCAASGFTFSSSDMSWVRQAPGKRLEWVSTISSGGSFTHYPDSVKGRFTISRDNSKNTLYLQMNSLRAEDTAVYYCVRRSLDWYFDVWGAGTTVTVSS

SEQ ID NO: 750 - protein, 118 aa, synthetic construct
  REGION 1..118: note = Description of Artificial Sequence: Synthetic polypeptide
  REGION 1..118: note = 2G4[PD-L1]_H1.15
EVQLLESGGGLVQPGGSLRLSCAASGFTFSSADMSWVRQAPGKRLEWVSTISSGGSFTHYPDSVKGRFTISRDNSKNTLYLQMNSLRAEDTAVYYCVRRSGDWYFDVWGAGTTVTVSS

SEQ ID NO: 751 - protein, 118 aa, synthetic construct
  REGION 1..118: note = Description of Artificial Sequence: Synthetic polypeptide
  REGION 1..118: note = 2G4[PD-L1]_H1.16
EVQLLESGGGLVQPGGSLRLSCAASGFTFSSRDMSWVRQAPGKRLEWVSTISSGGSFTHYPDSVKGRFTISRDNSKNTLYLQMNSLRAEDTAVYYCVRRSGDWYFDVWGAGTTVTVSS

SEQ ID NO: 752 - protein, 118 aa, synthetic construct
  REGION 1..118: note = Description of Artificial Sequence: Synthetic polypeptide
  REGION 1..118: note = 2G4[PD-L1]_H1.17
EVQLLESGGGLVQPGGSLRLSCAASGFTFPSRDMSWVRQAPGKRLEWVSTISSGGRFTHYPDSVKGRFTISRDNSKNTLYLQMNSLRAEDTAVYYCVRRSLDWYFDVWGAGTTVTVSS

SEQ ID NO: 753 - protein, 118 aa, synthetic construct
  REGION 1..118: note = Description of Artificial Sequence: Synthetic polypeptide
  REGION 1..118: note = 2G4[PD-L1]_H1.18
EVQLLESGGGLVQPGGSLRLSCAASGFTFPSKDMSWVRQAPGKRLEWVSTISSGGRFTHYPDSVKGRFTISRDNSKNTLYLQMNSLRAEDTAVYYCVRRSLDWYFDVWGAGTTVTVSS

SEQ ID NO: 754 - protein, 118 aa, synthetic construct
  REGION 1..118: note = Description of Artificial Sequence: Synthetic polypeptide
  REGION 1..118: note = 2G4[PD-L1]_H1.19
EVQLLESGGGLVQPGGSLRLSCAASGFTFHSSDMSWVRQAPGKRLEWVSTISSGGRFTHYPDSVKGRFTISRDNSKNTLYLQMNSLRAEDTAVYYCVRRSLDWYFDVWGAGTTVTVSS

SEQ ID NO: 755 - protein, 118 aa, synthetic construct
  REGION 1..118: note = Description of Artificial Sequence: Synthetic polypeptide
  REGION 1..118: note = 2G4[PD-L1]_H1.20
EVQLLESGGGLVQPGGSLRLSCAASGFTFHSADMSWVRQAPGKRLEWVSTISSGGRFTHYPDSVKGRFTISRDNSKNTLYLQMNSLRAEDTAVYYCVRRSLDWYFDVWGAGTTVTVSS

SEQ ID NO: 756 - protein, 118 aa, synthetic construct
  REGION 1..118: note = Description of Artificial Sequence: Synthetic polypeptide
  REGION 1..118: note = 2G4[PD-L1]_H1.21
EVQLLESGGGLVQPGGSLRLSCAASGFTFSWADMSWVRQAPGKRLEWVSTISSGGRFTHYPDSVKGRFTISRDNSKNTLYLQMNSLRAEDTAVYYCVRRSLDWYFDVWGAGTTVTVSS

SEQ ID NO: 757 - protein, 118 aa, synthetic construct
  REGION 1..118: note = Description of Artificial Sequence: Synthetic polypeptide
  REGION 1..118: note = 2G4[PD-L1]_H1.22
EVQLLESGGGLVQPGGSLRLSCAASGFTFSVRDMSWVRQAPGKRLEWVSTISSGGRFTHYPDSVKGRFTISRDNSKNTLYLQMNSLRAEDTAVYYCVRRSLDWYFDVWGAGTTVTVSS

SEQ ID NO: 758 - protein, 118 aa, synthetic construct
  REGION 1..118: note = Description of Artificial Sequence: Synthetic polypeptide
  REGION 1..118: note = 2G4[PD-L1]_H1.23
EVQLLESGGGLVQPGGSLRLSCAASGFTFSVKDMSWVRQAPGKRLEWVSTISSGGRFTHYPDSVKGRFTISRDNSKNTLYLQMNSLRAEDTAVYYCVRRSLDWYFDVWGAGTTVTVSS

SEQ ID NO: 759 - protein, 118 aa, synthetic construct
  REGION 1..118: note = Description of Artificial Sequence: Synthetic polypeptide
  REGION 1..118: note = 2G4[PD-L1]_H1.24
EVQLLESGGGLVQPGGSLRLSCAASGFTFSFSDMSWVRQAPGKRLEWVSTISSGGRFTHYPDSVKGRFTISRDNSKNTLYLQMNSLRAEDTAVYYCVRRSLDWYFDVWGAGTTVTVSS

SEQ ID NO: 760 - protein, 118 aa, synthetic construct
  REGION 1..118: note = Description of Artificial Sequence: Synthetic polypeptide
  REGION 1..118: note = 2G4[PD-L1]_H1.25
EVQLLESGGGLVQPGGSLRLSCAASGFTFSFRDMSWVRQAPGKRLEWVSTISSGGRFTHYPDSVKGRFTISRDNSKNTLYLQMNSLRAEDTAVYYCVRRSLDWYFDVWGAGTTVTVSS

SEQ ID NO: 761 - protein, 118 aa, synthetic construct
  REGION 1..118: note = Description of Artificial Sequence: Synthetic polypeptide
  REGION 1..118: note = 2G4[PD-L1]_H1.26
EVQLLESGGGLVQPGGSLRLSCAASGFTFSVSDMSWVRQAPGKRLEWVSTISSGGRFTHYPDSVKGRFTISRDNSKNTLYLQMNSLRAEDTAVYYCVRRSLDWYFDVWGAGTTVTVSS

SEQ ID NO: 762 - protein, 118 aa, synthetic construct
  REGION 1..118: note = Description of Artificial Sequence: Synthetic polypeptide
  REGION 1..118: note = 2G4[PD-L1]_H1.27
EVQLLESGGGLVQPGGSLRLSCAASGFTFSQSDMSWVRQAPGKRLEWVSTISSGGRFTHYPDSVKGRFTISRDNSKNTLYLQMNSLRAEDTAVYYCVRRSLDWYFDVWGAGTTVTVSS

SEQ ID NO: 763 - protein, 118 aa, synthetic construct
  REGION 1..118: note = Description of Artificial Sequence: Synthetic polypeptide
  REGION 1..118: note = 2G4[PD-L1]_H1.28
EVQLLESGGGLVQPGGSLRLSCAASGFTFPSSDMSWVRQAPGKRLEWVSTISSGGRFTHYPDSVKGRFTISRDNSKNTLYLQMNSLRAEDTAVYYCVRRSLDWYFDVWGAGTTVTVSS

SEQ ID NO: 764 - protein, 118 aa, synthetic construct
  REGION 1..118: note = Description of Artificial Sequence: Synthetic polypeptide
  REGION 1..118: note = 2G4[PD-L1]_H1.29
EVQLLESGGGLVQPGGSLRLSCAASGFTFSQKDMSWVRQAPGKRLEWVSTISSGGRFTHYPDSVKGRFTISRDNSKNTLYLQMNSLRAEDTAVYYCVRRSLDWYFDVWGAGTTVTVSS

SEQ ID NO: 765 - protein, 118 aa, synthetic construct
  REGION 1..118: note = Description of Artificial Sequence: Synthetic polypeptide
  REGION 1..118: note = 2G4[PD-L1]_H1.30
EVQLLESGGGLVQPGGSLRLSCAASGFTFSQYDMSWVRQAPGKRLEWVSTISSGGRFTHYPDSVKGRFTISRDNSKNTLYLQMNSLRAEDTAVYYCVRRSLDWYFDVWGAGTTVTVSS

SEQ ID NO: 766 - protein, 118 aa, synthetic construct
  REGION 1..118: note = Description of Artificial Sequence: Synthetic polypeptide
  REGION 1..118: note = 2G4[PD-L1]_H1.31
EVQLLESGGGLVQPGGSLRLSCAASGFTFRSYDMSWVRQAPGKRLEWVSTISSGGRFTHYPDSVKGRFTISRDNSKNTLYLQMNSLRAEDTAVYYCVRRSLDWYFDVWGAGTTVTVSS

SEQ ID NO: 767 - protein, 118 aa, synthetic construct
  REGION 1..118: note = Description of Artificial Sequence: Synthetic polypeptide
  REGION 1..118: note = 2G4[PD-L1]_H1.32
EVQLLESGGGLVQPGGSLRLSCAASGFTFSSSDMSWVRQAPGKRLEWVSTISSGGRFTHYPDSVKGRFTISRDNSKNTLYLQMNSLRAEDTAVYYCVRRSLDWYFDVWGAGTTVTVSS

SEQ ID NO: 768 - protein, 118 aa, synthetic construct
  REGION 1..118: note = Description of Artificial Sequence: Synthetic polypeptide
  REGION 1..118: note = 2G4[PD-L1]_H1.33
EVQLLESGGGLVQPGGSLRLSCAASGFTFSWYDMSWVRQAPGKRLEWVSTISSGGRFTHYPDSVKGRFTISRDNSKNTLYLQMNSLRAEDTAVYYCVRRSLDWYFDVWGAGTTVTVSS

SEQ ID NO: 769 - protein, 118 aa, synthetic construct
  REGION 1..118: note = Description of Artificial Sequence: Synthetic polypeptide
  REGION 1..118: note = 2G4[PD-L1]_H1.34
EVQLLESGGGLVQPGGSLRLSCAASGFTFSVYDMSWVRQAPGKRLEWVSTISSGGRFTHYPDSVKGRFTISRDNSKNTLYLQMNSLRAEDTAVYYCVRRSLDWYFDVWGAGTTVTVSS

SEQ ID NO: 770 - protein, 118 aa, synthetic construct
  REGION 1..118: note = Description of Artificial Sequence: Synthetic polypeptide
  REGION 1..118: note = 2G4[PD-L1]_H1.35
EVQLLESGGGLVQPGGSLRLSCAASGFTFSSKDMSWVRQAPGKRLEWVSTISSGGRFTHYPDSVKGRFTISRDNSKNTLYLQMNSLRAEDTAVYYCVRRSLDWYFDVWGAGTTVTVSS

SEQ ID NO: 771 - protein, 118 aa, synthetic construct
  REGION 1..118: note = Description of Artificial Sequence: Synthetic polypeptide
  REGION 1..118: note = 2G4[PD-L1]_H1.36
EVQLLESGGGLVQPGGSLRLSCAASGFTFSSADMSWVRQAPGKRLEWVSTISSGGRFTHYPDSVKGRFTISRDNSKNTLYLQMNSLRAEDTAVYYCVRRSLDWYFDVWGAGTTVTVSS

SEQ ID NO: 772 - protein, 118 aa, synthetic construct
  REGION 1..118: note = Description of Artificial Sequence: Synthetic polypeptide
  REGION 1..118: note = 2G4[PD-L1]_H1.37
EVQLLESGGGLVQPGGSLRLSCAASGFTFSSRDMSWVRQAPGKRLEWVSTISSGGRFTHYPDSVKGRFTISRDNSKNTLYLQMNSLRAEDTAVYYCVRRSLDWYFDVWGAGTTVTVSS

SEQ ID NO: 773 - protein, 118 aa, synthetic construct
  REGION 1..118: note = Description of Artificial Sequence: Synthetic polypeptide
  REGION 1..118: note = 2G4[PD-L1]_H1.38
EVQLLESGGGLVQPGGSLRLSCAASGFTFPSRDMSWVRQAPGKRLEWVSTISSGGRFTHYPDSVKGRFTISRDNSKNTLYLQMNSLRAEDTAVYYCARRSLDWYFDVWGAGTTVTVSS

SEQ ID NO: 774 - protein, 118 aa, synthetic construct
  REGION 1..118: note = Description of Artificial Sequence: Synthetic polypeptide
  REGION 1..118: note = 2G4[PD-L1]_H1.39
EVQLLESGGGLVQPGGSLRLSCAASGFTFPSKDMSWVRQAPGKRLEWVSTISSGGRFTHYPDSVKGRFTISRDNSKNTLYLQMNSLRAEDTAVYYCARRSLDWYFDVWGAGTTVTVSS

SEQ ID NO: 775 - protein, 118 aa, synthetic construct
  REGION 1..118: note = Description of Artificial Sequence: Synthetic polypeptide
  REGION 1..118: note = 2G4[PD-L1]_H1.40
EVQLLESGGGLVQPGGSLRLSCAASGFTFHSSDMSWVRQAPGKRLEWVSTISSGGRFTHYPDSVKGRFTISRDNSKNTLYLQMNSLRAEDTAVYYCARRSLDWYFDVWGAGTTVTVSS

SEQ ID NO: 776 - protein, 118 aa, synthetic construct
  REGION 1..118: note = Description of Artificial Sequence: Synthetic polypeptide
  REGION 1..118: note = 2G4[PD-L1]_H1.41
EVQLLESGGGLVQPGGSLRLSCAASGFTFHSADMSWVRQAPGKRLEWVSTISSGGRFTHYPDSVKGRFTISRDNSKNTLYLQMNSLRAEDTAVYYCARRSLDWYFDVWGAGTTVTVSS

SEQ ID NO: 777 - protein, 118 aa, synthetic construct
  REGION 1..118: note = Description of Artificial Sequence: Synthetic polypeptide
  REGION 1..118: note = 2G4[PD-L1]_H1.42
EVQLLESGGGLVQPGGSLRLSCAASGFTFSWADMSWVRQAPGKRLEWVSTISSGGRFTHYPDSVKGRFTISRDNSKNTLYLQMNSLRAEDTAVYYCARRSLDWYFDVWGAGTTVTVSS

SEQ ID NO: 778 - protein, 118 aa, synthetic construct
  REGION 1..118: note = Description of Artificial Sequence: Synthetic polypeptide
  REGION 1..118: note = 2G4[PD-L1]_H1.43
EVQLLESGGGLVQPGGSLRLSCAASGFTFSVRDMSWVRQAPGKRLEWVSTISSGGRFTHYPDSVKGRFTISRDNSKNTLYLQMNSLRAEDTAVYYCARRSLDWYFDVWGAGTTVTVSS

SEQ ID NO: 779 - protein, 118 aa, synthetic construct
  REGION 1..118: note = Description of Artificial Sequence: Synthetic polypeptide
  REGION 1..118: note = 2G4[PD-L1]_H1.44
EVQLLESGGGLVQPGGSLRLSCAASGFTFSVKDMSWVRQAPGKRLEWVSTISSGGRFTHYPDSVKGRFTISRDNSKNTLYLQMNSLRAEDTAVYYCARRSLDWYFDVWGAGTTVTVSS

SEQ ID NO: 780 - protein, 118 aa, synthetic construct
  REGION 1..118: note = Description of Artificial Sequence: Synthetic polypeptide
  REGION 1..118: note = 2G4[PD-L1]_H1.45
EVQLLESGGGLVQPGGSLRLSCAASGFTFSFSDMSWVRQAPGKRLEWVSTISSGGRFTHYPDSVKGRFTISRDNSKNTLYLQMNSLRAEDTAVYYCARRSLDWYFDVWGAGTTVTVSS

SEQ ID NO: 781 - protein, 118 aa, synthetic construct
  REGION 1..118: note = Description of Artificial Sequence: Synthetic polypeptide
  REGION 1..118: note = 2G4[PD-L1]_H1.46
EVQLLESGGGLVQPGGSLRLSCAASGFTFSFRDMSWVRQAPGKRLEWVSTISSGGRFTHYPDSVKGRFTISRDNSKNTLYLQMNSLRAEDTAVYYCARRSLDWYFDVWGAGTTVTVSS

SEQ ID NO: 782 - protein, 118 aa, synthetic construct
  REGION 1..118: note = Description of Artificial Sequence: Synthetic polypeptide
  REGION 1..118: note = 2G4[PD-L1]_H1.47
EVQLLESGGGLVQPGGSLRLSCAASGFTFSVSDMSWVRQAPGKRLEWVSTISSGGRFTHYPDSVKGRFTISRDNSKNTLYLQMNSLRAEDTAVYYCARRSLDWYFDVWGAGTTVTVSS

SEQ ID NO: 783 - protein, 118 aa, synthetic construct
  REGION 1..118: note = Description of Artificial Sequence: Synthetic polypeptide
  REGION 1..118: note = 2G4[PD-L1]_H1.48
EVQLLESGGGLVQPGGSLRLSCAASGFTFSQSDMSWVRQAPGKRLEWVSTISSGGRFTHYPDSVKGRFTISRDNSKNTLYLQMNSLRAEDTAVYYCARRSLDWYFDVWGAGTTVTVSS

SEQ ID NO: 784 - protein, 118 aa, synthetic construct
  REGION 1..118: note = Description of Artificial Sequence: Synthetic polypeptide
  REGION 1..118: note = 2G4[PD-L1]_H1.49
EVQLLESGGGLVQPGGSLRLSCAASGFTFPSSDMSWVRQAPGKRLEWVSTISSGGRFTHYPDSVKGRFTISRDNSKNTLYLQMNSLRAEDTAVYYCARRSLDWYFDVWGAGTTVTVSS

SEQ ID NO: 785 - protein, 118 aa, synthetic construct
  REGION 1..118: note = Description of Artificial Sequence: Synthetic polypeptide
  REGION 1..118: note = 2G4[PD-L1]_H1.50
EVQLLESGGGLVQPGGSLRLSCAASGFTFSQKDMSWVRQAPGKRLEWVSTISSGGRFTHYPDSVKGRFTISRDNSKNTLYLQMNSLRAEDTAVYYCARRSLDWYFDVWGAGTTVTVSS

SEQ ID NO: 786 - protein, 118 aa, synthetic construct
  REGION 1..118: note = Description of Artificial Sequence: Synthetic polypeptide
  REGION 1..118: note = 2G4[PD-L1]_H1.51
EVQLLESGGGLVQPGGSLRLSCAASGFTFSQYDMSWVRQAPGKRLEWVSTISSGGRFTHYPDSVKGRFTISRDNSKNTLYLQMNSLRAEDTAVYYCARRSLDWYFDVWGAGTTVTVSS

SEQ ID NO: 787 - protein, 118 aa, synthetic construct
  REGION 1..118: note = Description of Artificial Sequence: Synthetic polypeptide
  REGION 1..118: note = 2G4[PD-L1]_H1.52
EVQLLESGGGLVQPGGSLRLSCAASGFTFRSYDMSWVRQAPGKRLEWVSTISSGGRFTHYPDSVKGRFTISRDNSKNTLYLQMNSLRAEDTAVYYCARRSLDWYFDVWGAGTTVTVSS

SEQ ID NO: 788 - protein, 118 aa, synthetic construct
  REGION 1..118: note = Description of Artificial Sequence: Synthetic polypeptide
  REGION 1..118: note = 2G4[PD-L1]_H1.53
EVQLLESGGGLVQPGGSLRLSCAASGFTFSSSDMSWVRQAPGKRLEWVSTISSGGRFTHYPDSVKGRFTISRDNSKNTLYLQMNSLRAEDTAVYYCARRSLDWYFDVWGAGTTVTVSS

SEQ ID NO: 789 - protein, 118 aa, synthetic construct
  REGION 1..118: note = Description of Artificial Sequence: Synthetic polypeptide
  REGION 1..118: note = 2G4[PD-L1]_H1.54
EVQLLESGGGLVQPGGSLRLSCAASGFTFSWYDMSWVRQAPGKRLEWVSTISSGGRFTHYPDSVKGRFTISRDNSKNTLYLQMNSLRAEDTAVYYCARRSLDWYFDVWGAGTTVTVSS

SEQ ID NO: 790 - protein, 118 aa, synthetic construct
  REGION 1..118: note = Description of Artificial Sequence: Synthetic polypeptide
  REGION 1..118: note = 2G4[PD-L1]_H1.55
EVQLLESGGGLVQPGGSLRLSCAASGFTFSVYDMSWVRQAPGKRLEWVSTISSGGRFTHYPDSVKGRFTISRDNSKNTLYLQMNSLRAEDTAVYYCARRSLDWYFDVWGAGTTVTVSS

SEQ ID NO: 791 - protein, 118 aa, synthetic construct
  REGION 1..118: note = Description of Artificial Sequence: Synthetic polypeptide
  REGION 1..118: note = 2G4[PD-L1]_H1.56
EVQLLESGGGLVQPGGSLRLSCAASGFTFSSKDMSWVRQAPGKRLEWVSTISSGGRFTHYPDSVKGRFTISRDNSKNTLYLQMNSLRAEDTAVYYCARRSLDWYFDVWGAGTTVTVSS

SEQ ID NO: 792 - protein, 118 aa, synthetic construct
  REGION 1..118: note = Description of Artificial Sequence: Synthetic polypeptide
  REGION 1..118: note = 2G4[PD-L1]_H1.57
EVQLLESGGGLVQPGGSLRLSCAASGFTFSSADMSWVRQAPGKRLEWVSTISSGGRFTHYPDSVKGRFTISRDNSKNTLYLQMNSLRAEDTAVYYCARRSLDWYFDVWGAGTTVTVSS

SEQ ID NO: 793 - protein, 118 aa, synthetic construct
  REGION 1..118: note = Description of Artificial Sequence: Synthetic polypeptide
  REGION 1..118: note = 2G4[PD-L1]_H1.58
EVQLLESGGGLVQPGGSLRLSCAASGFTFSSRDMSWVRQAPGKRLEWVSTISSGGRFTHYPDSVKGRFTISRDNSKNTLYLQMNSLRAEDTAVYYCARRSLDWYFDVWGAGTTVTVSS

SEQ ID NO: 794 - protein, 118 aa, synthetic construct
  REGION 1..118: note = Description of Artificial Sequence: Synthetic polypeptide
  REGION 1..118: note = 2G4[PD-L1]_H1.59
EVQLLESGGGLVQPGGSLRLSCAASGFTFHSRDMSWVRQAPGKGLEWVSTISSGGRFTHYPDSVKGRFTISRDNSKNTLYLQMNSLRAEDTAVYYCARRSGDWYFDVWGAGTTVTVSS

SEQ ID NO: 795 - protein, 118 aa, synthetic construct
  REGION 1..118: note = Description of Artificial Sequence: Synthetic polypeptide
  REGION 1..118: note = 2G4[PD-L1]_H1.60
EVQLLESGGGLVQPGGSLRLSCAASGFTFSSSDMSWVRQAPGKGLEWVSTISSGGSFTHYPDSVKGRFTISRDNSKNTLYLQMNSLRAEDTAVYYCARRSLDWYFDVWGAGTTVTVSS

SEQ ID NO: 796 - protein, 118 aa, synthetic construct
  REGION 1..118: note = Description of Artificial Sequence: Synthetic polypeptide
  REGION 1..118: note = 2G4[PD-L1]_H1.61
EVQLLESGGGLVQPGGSLRLSCAASGFTFSSYDMSWVRQAPGKGLEWVSTISSGGSFTHYPDSVKGRFTISRDNSKNTLYLQMNSLRAEDTAVYYCARRSLDWYFDVWGAGTTVTVSS

SEQ ID NO: 797 - protein, 118 aa, synthetic construct
  REGION 1..118: note = Description of Artificial Sequence: Synthetic polypeptide
  REGION 1..118: note = 2G4[PD-L1]_H1.62
EVQLLESGGGLVQPGGSLRLSCAASGFTFSSYDMSWVRQAPGKGLEWVSTISSGGSFTHYPDSVKGRFTISRDNSKNTLYLQMNSLRAEDTAVYYCARRSGDWYFDVWGAGTTVTVSS

SEQ ID NO: 798 - protein, 109 aa, synthetic construct
  REGION 1..109: note = Description of Artificial Sequence: Synthetic polypeptide
  REGION 1..109: note = 2G4[PD-L1]_L1.1
EIVLTQSPGTLSLSPGERATLSCRVSSSISSSNLHWYQQKPGQSPRPLIYGTSNLASGVPVRFSGSGSGTDYTLTISRLEPEDFAVYYCQQWWSYPLYTFGGGTKVEIK

SEQ ID NO: 799 - protein, 109 aa, synthetic construct
  REGION 1..109: note = Description of Artificial Sequence: Synthetic polypeptide
  REGION 1..109: note = 2G4[PD-L1]_L1.2
EIVLTQSPGTLSLSPGERATLSCRVSSSISSSNLHWYQQKPGQSPRPLIYGTSNLASGVPVRFSGSGSGTDYTLTISRLEPEDFAVYYCQQWFSYPLYTFGGGTKVEIK

SEQ ID NO: 800 - protein, 109 aa, synthetic construct
  REGION 1..109: note = Description of Artificial Sequence: Synthetic polypeptide
  REGION 1..109: note = 2G4[PD-L1]_L1.3
EIVLTQSPGTLSLSPGERATLSCRVSSSISSSNLHWYQQKPGQSPRPLIYGTSNLASGVPVRFSGSGSGTDYTLTISRLEPEDFAVYYCQQWSSYPLWTFGGGTKVEIK

SEQ ID NO: 801 - protein, 109 aa, synthetic construct
  REGION 1..109: note = Description of Artificial Sequence: Synthetic polypeptide
  REGION 1..109: note = 2G4[PD-L1]_L1.4
EIVLTQSPGTLSLSPGERATLSCRVSWSGSSSNLHWYQQKPGQSPRLLIYGTSNLAGGVPVRFSGSGSGTDYTLTISRLEPEDFAVYYCQQWSSYPLYTFGGGTKVEIK

SEQ ID NO: 802 - protein, 109 aa, synthetic construct
  REGION 1..109: note = Description of Artificial Sequence: Synthetic polypeptide
  REGION 1..109: note = 2G4[PD-L1]_L1.5
EIVLTQSPGTLSLSPGERATLSCRVSSSISSSNLHWYQQKPGQSPRPLIYGTSNLASGVPVRFSGSGSGTDYTLTISRLEPEDFAVYYCQQWHSYPLYTFGGGTKVEIK

SEQ ID NO: 803 - protein, 109 aa, synthetic construct
  REGION 1..109: note = Description of Artificial Sequence: Synthetic polypeptide
  REGION 1..109: note = 2G4[PD-L1]_L1.6
EIVLTQSPGTLSLSPGERATLSCRVSSFIVSSNLHWYQQKPGQSPRPLIYGTSNLASGVPVRFSGSGSGTDYTLTISRLEPEDFAVYYCQQWSSYPLYTFGGGTKVEIK

SEQ ID NO: 804 - protein, 109 aa, synthetic construct
  REGION 1..109: note = Description of Artificial Sequence: Synthetic polypeptide
  REGION 1..109: note = 2G4[PD-L1]_L1.7
EIVLTQSPGTLSLSPGERATLSCRVSSSINFSNLHWYQQKPGQSPRPLIYGTSNLASGVPVRFSGSGSGTDYTLTISRLEPEDFAVYYCQQWSSYPLYTFGGGTKVEIK

SEQ ID NO: 805 - protein, 109 aa, synthetic construct
  REGION 1..109: note = Description of Artificial Sequence: Synthetic polypeptide
  REGION 1..109: note = 2G4[PD-L1]_L1.8
EIVLTQSPGTLSLSPGERATLSCRVSLSINSSNLHWYQQKPGQSPRPLIYGTNLLASGVPVRFSGSGSGTDYTLTISRLEPEDFAVYYCQQWSSYPLYTFGGGTKVEIK

SEQ ID NO: 806 - protein, 109 aa, synthetic construct
  REGION 1..109: note = Description of Artificial Sequence: Synthetic polypeptide
  REGION 1..109: note = 2G4[PD-L1]_L1.9
EIVLTQSPGTLSLSPGERATLSCRVSSSIIRSNLHWYQQKPGQSPRPLIYGTSQLASGVPVRFSGSGSGTDYTLTISRLEPEDFAVYYCQQWSSYPLYTFGGGTKVEIK

SEQ ID NO: 807 - protein, 109 aa, synthetic construct
  REGION 1..109: note = Description of Artificial Sequence: Synthetic polypeptide
  REGION 1..109: note = 2G4[PD-L1]_L1.10
EIVLTQSPGTLSLSPGERATLSCRVSSSINSTNLHWYQQKPGQSPRPLIYGTSVLATGVPVRFSGSGSGTDYTLTISRLEPEDFAVYYCQQWSSYPLYTFGGGTKVEIK

SEQ ID NO: 808 - protein, 109 aa, synthetic construct
  REGION 1..109: note = Description of Artificial Sequence: Synthetic polypeptide
  REGION 1..109: note = 2G4[PD-L1]_L1.11
EIVLTQSPGTLSLSPGERATLSCRVSSSINPSNLHWYQQKPGQSPRPLIYGTSNLASGVPVRFSGSGSGTDYTLTISRLEPEDFAVYYCQQWSSYPLYTFGGGTKVEIK

SEQ ID NO: 809 - protein, 109 aa, synthetic construct
  REGION 1..109: note = Description of Artificial Sequence: Synthetic polypeptide
  REGION 1..109: note = 2G4[PD-L1]_L1.12
EIVLTQSPGTLSLSPGERATLSCRASSSITSSNLHWYQQKPGQSPRPLIYGTSNLASGVPVRFSGSGSGTDYTLTISRLEPEDFAVYYCQQWSSYPLYTFGGGTKVEIK

SEQ ID NO: 810 - protein, 109 aa, synthetic construct
  REGION 1..109: note = Description of Artificial Sequence: Synthetic polypeptide
  REGION 1..109: note = 2G4[PD-L1]_L1.13
EIVLTQSPGTLSLSPGERATLSCRASSSMVSSNLHWYQQKPGQSPRPLIYGTSNLASGVPVRFSGSGSGTDYTLTISRLEPEDFAVYYCQQWSSYPLYTFGGGTKVEIK

SEQ ID NO: 811 - protein, 109 aa, synthetic construct
  REGION 1..109: note = Description of Artificial Sequence: Synthetic polypeptide
  REGION 1..109: note = 2G4[PD-L1]_L1.14
EIVLTQSPGTLSLSPGERATLSCRVSSSIQSSNLHWYQQKPGQSPRPLIYGTSNLASGVPVRFSGSGSGTDYTLTISRLEPEDFAVYYCQQWSSYPLYTFGGGTKVEIK

SEQ ID NO: 812 - protein, 109 aa, synthetic construct
  REGION 1..109: note = Description of Artificial Sequence: Synthetic polypeptide
  REGION 1..109: note = 2G4[PD-L1]_L1.15
EIVLTQSPGTLSLSPGERATLSCRVSSSIQLSNLHWYQQKPGQSPRPLIYGTSNLASGVPVRFSGSGSGTDYTLTISRLEPEDFAVYYCQQWSSYPLYTFGGGTKVEIK

SEQ ID NO: 813 - protein, 109 aa, synthetic construct
  REGION 1..109: note = Description of Artificial Sequence: Synthetic polypeptide
  REGION 1..109: note = 2G4[PD-L1]_L1.16
EIVLTQSPGTLSLSPGERATLSCRASSSINDSNLHWYQQKPGQSPRLLIYGTSNLRSGVPVRFSGSGSGTDYTLTISRLEPEDFAVYYCQQWSSYPLYTFGGGTKVEIK

SEQ ID NO: 814 - protein, 109 aa, synthetic construct
  REGION 1..109: note = Description of Artificial Sequence: Synthetic polypeptide
  REGION 1..109: note = 2G4[PD-L1]_L1.17
EIVLTQSPGTLSLSPGERATLSCRVSSSISLSNLHWYQQKPGQSPRPLIYGTSNLASGVPVRFSGSGSGTDYTLTISRLEPEDFAVYYCQQWSSYPLYTFGGGTKVEIK

SEQ ID NO: 815 - protein, 109 aa, synthetic construct
  REGION 1..109: note = Description of Artificial Sequence: Synthetic polypeptide
  REGION 1..109: note = 2G4[PD-L1]_L1.18
EIVLTQSPGTLSLSPGERATLSCRASSRISRSNLHWYQQKPGQSPRPLIYGTINLASGVPVRFSGSGSGTDYTLTISRLEPEDFAVYYCQQWSSYPLYTFGGGTKVEIK

SEQ ID NO: 816 - protein, 109 aa, synthetic construct
  REGION 1..109: note = Description of Artificial Sequence: Synthetic polypeptide
  REGION 1..109: note = 2G4[PD-L1]_L1.19
EIVLTQSPGTLSLSPGERATLSCRVSSSINGSNLHWYQQKPGQSPRPLIYGTSNLASGVPVRFSGSGSGTDYTLTISRLEPEDFAVYYCQQWSSYPLYTFGGGTKVEIK

SEQ ID NO: 817 - protein, 109 aa, synthetic construct
  REGION 1..109: note = Description of Artificial Sequence: Synthetic polypeptide
  REGION 1..109: note = 2G4[PD-L1]_L1.20
EIVLTQSPGTLSLSPGERATLSCRVSSSINSSNLHWYQQKPGQSPRPLIYGTSNLASGVPVRFSGSGSGTDYTLTISRLEPEDFAVYYCQQWSSYPLYTFGGGTKVEIK

SEQ ID NO: 818 - protein, 109 aa, synthetic construct
  REGION 1..109: note = Description of Artificial Sequence: Synthetic polypeptide
  REGION 1..109: note = 2G4[PD-L1]_L1.21
EIVLTQSPGTLSLSPGERATLSCRVSYSISRSNLHWYQQKPGQSPRPLIYGTSNRLSGVPVRFSGSGSGTDYTLTISRLEPEDFAVYYCQQWSSYPLYTFGGGTKVEIK

SEQ ID NO: 819 - protein, 109 aa, synthetic construct
  REGION 1..109: note = Description of Artificial Sequence: Synthetic polypeptide
  REGION 1..109: note = 2G4[PD-L1]_L1.22
EIVLTQSPGTLSLSPGERATLSCRVSSSIQFSNLHWYQQKPGQSPRPLIYGTSNLASGVPVRFSGSGSGTDYTLTISRLEPEDFAVYYCQQWSSYPLYTFGGGTKVEIK

SEQ ID NO: 820 - protein, 109 aa, synthetic construct
  REGION 1..109: note = Description of Artificial Sequence: Synthetic polypeptide
  REGION 1..109: note = 2G4[PD-L1]_L1.23
EIVLTQSPGTLSLSPGERATLSCRVSLSIQSSNLHWYQQKPGQSPRPLIYGTNLLASGVPVRFSGSGSGTDYTLTISRLEPEDFAVYYCQQWSSYPLYTFGGGTKVEIK

SEQ ID NO: 821 - protein, 109 aa, synthetic construct
  REGION 1..109: note = Description of Artificial Sequence: Synthetic polypeptide
  REGION 1..109: note = 2G4[PD-L1]_L1.24
EIVLTQSPGTLSLSPGERATLSCRVSSSIQSTNLHWYQQKPGQSPRPLIYGTSVLATGVPVRFSGSGSGTDYTLTISRLEPEDFAVYYCQQWSSYPLYTFGGGTKVEIK

SEQ ID NO: 822 - protein, 109 aa, synthetic construct
  REGION 1..109: note = Description of Artificial Sequence: Synthetic polypeptide
  REGION 1..109: note = 2G4[PD-L1]_L1.25
EIVLTQSPGTLSLSPGERATLSCRVSSSIQPSNLHWYQQKPGQSPRPLIYGTSNLASGVPVRFSGSGSGTDYTLTISRLEPEDFAVYYCQQWSSYPLYTFGGGTKVEIK

SEQ ID NO: 823 - protein, 109 aa, synthetic construct
  REGION 1..109: note = Description of Artificial Sequence: Synthetic polypeptide
  REGION 1..109: note = 2G4[PD-L1]_L1.26
EIVLTQSPGTLSLSPGERATLSCRASSSIQDSNLHWYQQKPGQSPRLLIYGTSNLRSGVPVRFSGSGSGTDYTLTISRLEPEDFAVYYCQQWSSYPLYTFGGGTKVEIK

SEQ ID NO: 824 - protein, 109 aa, synthetic construct
  REGION 1..109: note = Description of Artificial Sequence: Synthetic polypeptide
  REGION 1..109: note = 2G4[PD-L1]_L1.27
EIVLTQSPGTLSLSPGERATLSCRVSSSIQGSNLHWYQQKPGQSPRPLIYGTSNLASGVPVRFSGSGSGTDYTLTISRLEPEDFAVYYCQQWSSYPLYTFGGGTKVEIK

SEQ ID NO: 825 - protein, 109 aa, synthetic construct
  REGION 1..109: note = Description of Artificial Sequence: Synthetic polypeptide
  REGION 1..109: note = 2G4[PD-L1]_L1.28
EIVLTQSPGTLSLSPGERATLSCRVSSFIVLSNLHWYQQKPGQSPRPLIYGTSVLATGVPVRFSGSGSGTDYTLTISRLEPEDFAVYYCQQWSSYPLWTFGGGTKVEIK

SEQ ID NO: 826 - protein, 109 aa, synthetic construct
  REGION 1..109: note = Description of Artificial Sequence: Synthetic polypeptide
  REGION 1..109: note = 2G4[PD-L1]_L1.29
EIVLTQSPGTLSLSPGERATLSCRVSSRIVLSNLHWYQQKPGQSPRPLIYGTSVLATGVPVRFSGSGSGTDYTLTISRLEPEDFAVYYCQQWSSYPLWTFGGGTKVEIK

SEQ ID NO: 827 - protein, 109 aa, synthetic construct
  REGION 1..109: note = Description of Artificial Sequence: Synthetic polypeptide
  REGION 1..109: note = 2G4[PD-L1]_L1.30
EIVLTQSPGTLSLSPGERATLSCRASSFIVLSNLHWYQQKPGQSPRPLIYGTSVLATGVPVRFSGSGSGTDYTLTISRLEPEDFAVYYCQQWSSYPLWTFGGGTKVEIK

SEQ ID NO: 828 - protein, 109 aa, synthetic construct
  REGION 1..109: note = Description of Artificial Sequence: Synthetic polypeptide
  REGION 1..109: note = 2G4[PD-L1]_L1.31
EIVLTQSPGTLSLSPGERATLSCRASSRIVLSNLHWYQQKPGQSPRPLIYGTSVLATGVPVRFSGSGSGTDYTLTISRLEPEDFAVYYCQQWSSYPLWTFGGGTKVEIK

SEQ ID NO: 829 - protein, 109 aa, synthetic construct
  REGION 1..109: note = Description of Artificial Sequence: Synthetic polypeptide
  REGION 1..109: note = 2G4[PD-L1]_L1.32
EIVLTQSPGTLSLSPGERATLSCRVSSFIQLSNLHWYQQKPGQSPRPLIYGTSVLATGVPVRFSGSGSGTDYTLTISRLEPEDFAVYYCQQWSSYPLWTFGGGTKVEIK

SEQ ID NO: 830 - protein, 109 aa, synthetic construct
  REGION 1..109: note = Description of Artificial Sequence: Synthetic polypeptide
  REGION 1..109: note = 2G4[PD-L1]_L1.33
EIVLTQSPGTLSLSPGERATLSCRVSSRIQLSNLHWYQQKPGQSPRPLIYGTSVLATGVPVRFSGSGSGTDYTLTISRLEPEDFAVYYCQQWSSYPLWTFGGGTKVEIK

SEQ ID NO: 831 - protein, 109 aa, synthetic construct
  REGION 1..109: note = Description of Artificial Sequence: Synthetic polypeptide
  REGION 1..109: note = 2G4[PD-L1]_L1.34
EIVLTQSPGTLSLSPGERATLSCRASSFIQLSNLHWYQQKPGQSPRLLIYGTSVLATGVPVRFSGSGSGTDYTLTISRLEPEDFAVYYCQQWSSYPLWTFGGGTKVEIK

SEQ ID NO: 832 - protein, 109 aa, synthetic construct
  REGION 1..109: note = Description of Artificial Sequence: Synthetic polypeptide
  REGION 1..109: note = 2G4[PD-L1]_L1.35
EIVLTQSPGTLSLSPGERATLSCRASSRIQLSNLHWYQQKPGQSPRPLIYGTSVLATGVPVRFSGSGSGTDYTLTISRLEPEDFAVYYCQQWSSYPLWTFGGGTKVEIK

SEQ ID NO: 833 - protein, 109 aa, synthetic construct
  REGION 1..109: note = Description of Artificial Sequence: Synthetic polypeptide
  REGION 1..109: note = 2G4[PD-L1]_L1.36
EIVLTQSPGTLSLSPGERATLSCRVSSFISRSNLHWYQQKPGQSPRPLIYGTSVLATGVPVRFSGSGSGTDYTLTISRLEPEDFAVYYCQQWSSYPLWTFGGGTKVEIK

SEQ ID NO: 834 - protein, 109 aa, synthetic construct
  REGION 1..109: note = Description of Artificial Sequence: Synthetic polypeptide
  REGION 1..109: note = 2G4[PD-L1]_L1.37
EIVLTQSPGTLSLSPGERATLSCRVSSRISRSNLHWYQQKPGQSPRPLIYGTSVLATGVPVRFSGSGSGTDYTLTISRLEPEDFAVYYCQQWSSYPLWTFGGGTKVEIK

SEQ ID NO: 835 - protein, 109 aa, synthetic construct
  REGION 1..109: note = Description of Artificial Sequence: Synthetic polypeptide
  REGION 1..109: note = 2G4[PD-L1]_L1.38
EIVLTQSPGTLSLSPGERATLSCRASSFISRSNLHWYQQKPGQSPRPLIYGTSVLATGVPVRFSGSGSGTDYTLTISRLEPEDFAVYYCQQWSSYPLWTFGGGTKVEIK

SEQ ID NO: 836 - protein, 109 aa, synthetic construct
  REGION 1..109: note = Description of Artificial Sequence: Synthetic polypeptide
  REGION 1..109: note = 2G4[PD-L1]_L1.39
EIVLTQSPGTLSLSPGERATLSCRASSRISRSNLHWYQQKPGQSPRPLIYGTSVLATGVPVRFSGSGSGTDYTLTISRLEPEDFAVYYCQQWSSYPLWTFGGGTKVEIK

SEQ ID NO: 837 - protein, 109 aa, synthetic construct
  REGION 1..109: note = Description of Artificial Sequence: Synthetic polypeptide
  REGION 1..109: note = 2G4[PD-L1]_L1.40
EIVLTQSPGTLSLSPGERATLSCRVSSFIQRSNLHWYQQKPGQSPRPLIYGTSVLATGVPVRFSGSGSGTDYTLTISRLEPEDFAVYYCQQWSSYPLWTFGGGTKVEIK

SEQ ID NO: 838 - protein, 109 aa, synthetic construct
  REGION 1..109: note = Description of Artificial Sequence: Synthetic polypeptide
  REGION 1..109: note = 2G4[PD-L1]_L1.41
EIVLTQSPGTLSLSPGERATLSCRVSSRIQRSNLHWYQQKPGQSPRPLIYGTSVLATGVPVRFSGSGSGTDYTLTISRLEPEDFAVYYCQQWSSYPLWTFGGGTKVEIK

SEQ ID NO: 839 - protein, 109 aa, synthetic construct
  REGION 1..109: note = Description of Artificial Sequence: Synthetic polypeptide
  REGION 1..109: note = 2G4[PD-L1]_L1.42
EIVLTQSPGTLSLSPGERATLSCRASSFIQRSNLHWYQQKPGQSPRPLIYGTSVLATGVPVRFSGSGSGTDYTLTISRLEPEDFAVYYCQQWSSYPLWTFGGGTKVEIK

SEQ ID NO: 840 - protein, 109 aa, synthetic construct
  REGION 1..109: note = Description of Artificial Sequence: Synthetic polypeptide
  REGION 1..109: note = 2G4[PD-L1]_L1.43
EIVLTQSPGTLSLSPGERATLSCRASSRIQRSNLHWYQQKPGQSPRPLIYGTSVLATGVPVRFSGSGSGTDYTLTISRLEPEDFAVYYCQQWSSYPLWTFGGGTKVEIK

SEQ ID NO: 841 - protein, 109 aa, synthetic construct
  REGION 1..109: note = Description of Artificial Sequence: Synthetic polypeptide
  REGION 1..109: note = 2G4[PD-L1]_L1.44
EIVLTQSPGTLSLSPGERATLSCRVSSFIVLSNLHWYQQKPGQSPRPLIYGTSVLATGVPVRFSGSGSGTDYTLTISRLEPEDFAVYYCQQWSSYPLYTFGGGTKVEIK

SEQ ID NO: 842 - protein, 109 aa, synthetic construct
  REGION 1..109: note = Description of Artificial Sequence: Synthetic polypeptide
  REGION 1..109: note = 2G4[PD-L1]_L1.45
EIVLTQSPGTLSLSPGERATLSCRVSSRIVLSNLHWYQQKPGQSPRPLIYGTSVLATGVPVRFSGSGSGTDYTLTISRLEPEDFAVYYCQQWSSYPLYTFGGGTKVEIK

SEQ ID NO: 843 - protein, 109 aa, synthetic construct
  REGION 1..109: note = Description of Artificial Sequence: Synthetic polypeptide
  REGION 1..109: note = 2G4[PD-L1]_L1.46
EIVLTQSPGTLSLSPGERATLSCRASSFIVLSNLHWYQQKPGQSPRPLIYGTSVLATGVPVRFSGSGSGTDYTLTISRLEPEDFAVYYCQQWSSYPLYTFGGGTKVEIK

SEQ ID NO: 844 - protein, 109 aa, synthetic construct
  REGION 1..109: note = Description of Artificial Sequence: Synthetic polypeptide
  REGION 1..109: note = 2G4[PD-L1]_L1.47
EIVLTQSPGTLSLSPGERATLSCRASSRIVLSNLHWYQQKPGQSPRLLIYGTSVLATGVPVRFSGSGSGTDYTLTISRLEPEDFAVYYCQQWSSYPLYTFGGGTKVEIK

SEQ ID NO: 845 - protein, 109 aa, synthetic construct
  REGION 1..109: note = Description of Artificial Sequence: Synthetic polypeptide
  REGION 1..109: note = 2G4[PD-L1]_L1.48
EIVLTQSPGTLSLSPGERATLSCRVSSFIQLSNLHWYQQKPGQSPRPLIYGTSVLATGVPVRFSGSGSGTDYTLTISRLEPEDFAVYYCQQWSSYPLYTFGGGTKVEIK

SEQ ID NO: 846 - protein, 109 aa, synthetic construct
  REGION 1..109: note = Description of Artificial Sequence: Synthetic polypeptide
  REGION 1..109: note = 2G4[PD-L1]_L1.49
EIVLTQSPGTLSLSPGERATLSCRVSSRIQLSNLHWYQQKPGQSPRPLIYGTSVLATGVPVRFSGSGSGTDYTLTISRLEPEDFAVYYCQQWSSYPLYTFGGGTKVEIK

SEQ ID NO: 847 - protein, 109 aa, synthetic construct
  REGION 1..109: note = Description of Artificial Sequence: Synthetic polypeptide
  REGION 1..109: note = 2G4[PD-L1]_L1.50
EIVLTQSPGTLSLSPGERATLSCRASSFIQLSNLHWYQQKPGQSPRPLIYGTSVLATGVPVRFSGSGSGTDYTLTISRLEPEDFAVYYCQQWSSYPLYTFGGGTKVEIK

SEQ ID NO: 848 - protein, 109 aa, synthetic construct
  REGION 1..109: note = Description of Artificial Sequence: Synthetic polypeptide
  REGION 1..109: note = 2G4[PD-L1]_L1.51
EIVLTQSPGTLSLSPGERATLSCRASSRIQLSNLHWYQQKPGQSPRPLIYGTSVLATGVPVRFSGSGSGTDYTLTISRLEPEDFAVYYCQQWSSYPLYTFGGGTKVEIK

SEQ ID NO: 849 - protein, 109 aa, synthetic construct
  REGION 1..109: note = Description of Artificial Sequence: Synthetic polypeptide
  REGION 1..109: note = 2G4[PD-L1]_L1.52
EIVLTQSPGTLSLSPGERATLSCRVSSFISRSNLHWYQQKPGQSPRPLIYGTSVLATGVPVRFSGSGSGTDYTLTISRLEPEDFAVYYCQQWSSYPLYTFGGGTKVEIK

SEQ ID NO: 850 - protein, 109 aa, synthetic construct
  REGION 1..109: note = Description of Artificial Sequence: Synthetic polypeptide
  REGION 1..109: note = 2G4[PD-L1]_L1.53
EIVLTQSPGTLSLSPGERATLSCRVSSRISRSNLHWYQQKPGQSPRPLIYGTSVLATGVPVRFSGSGSGTDYTLTISRLEPEDFAVYYCQQWSSYPLYTFGGGTKVEIK

SEQ ID NO: 851 - protein, 109 aa, synthetic construct
  REGION 1..109: note = Description of Artificial Sequence: Synthetic polypeptide
  REGION 1..109: note = 2G4[PD-L1]_L1.54
EIVLTQSPGTLSLSPGERATLSCRASSFISRSNLHWYQQKPGQSPRPLIYGTSVLATGVPVRFSGSGSGTDYTLTISRLEPEDFAVYYCQQWSSYPLYTFGGGTKVEIK

SEQ ID NO: 852 - protein, 109 aa, synthetic construct
  REGION 1..109: note = Description of Artificial Sequence: Synthetic polypeptide
  REGION 1..109: note = 2G4[PD-L1]_L1.55
EIVLTQSPGTLSLSPGERATLSCRASSRISRSNLHWYQQKPGQSPRPLIYGTSVLATGVPVRFSGSGSGTDYTLTISRLEPEDFAVYYCQQWSSYPLYTFGGGTKVEIK

SEQ ID NO: 853 - protein, 109 aa, synthetic construct
  REGION 1..109: note = Description of Artificial Sequence: Synthetic polypeptide
  REGION 1..109: note = 2G4[PD-L1]_L1.56
EIVLTQSPGTLSLSPGERATLSCRVSSFIQRSNLHWYQQKPGQSPRPLIYGTSVLATGVPVRFSGSGSGTDYTLTISRLEPEDFAVYYCQQWSSYPLYTFGGGTKVEIK

SEQ ID NO: 854 - protein, 109 aa, synthetic construct
  REGION 1..109: note = Description of Artificial Sequence: Synthetic polypeptide
  REGION 1..109: note = 2G4[PD-L1]_L1.57
EIVLTQSPGTLSLSPGERATLSCRVSSRIQRSNLHWYQQKPGQSPRPLIYGTSVLATGVPVRFSGSGSGTDYTLTISRLEPEDFAVYYCQQWSSYPLYTFGGGTKVEIK

SEQ ID NO: 855 - protein, 109 aa, synthetic construct
  REGION 1..109: note = Description of Artificial Sequence: Synthetic polypeptide
  REGION 1..109: note = 2G4[PD-L1]_L1.58
EIVLTQSPGTLSLSPGERATLSCRASSFIQRSNLHWYQQKPGQSPRPLIYGTSVLATGVPVRFSGSGSGTDYTLTISRLEPEDFAVYYCQQWSSYPLYTFGGGTKVEIK

SEQ ID NO: 856 - protein, 109 aa, synthetic construct
  REGION 1..109: note = Description of Artificial Sequence: Synthetic polypeptide
  REGION 1..109: note = 2G4[PD-L1]_L1.59
EIVLTQSPGTLSLSPGERATLSCRASSRIQRSNLHWYQQKPGQSPRPLIYGTSVLATGVPVRFSGSGSGTDYTLTISRLEPEDFAVYYCQQWSSYPLYTFGGGTKVEIK

SEQ ID NO: 857 - protein, 109 aa, synthetic construct
  REGION 1..109: note = Description of Artificial Sequence: Synthetic polypeptide
  REGION 1..109: note = 2G4[PD-L1]_L1.60
EIVLTQSPGTLSLSPGERATLSCRASSSISSSNLHWYQQKPGQSPRLLIYGTSNLASGVPVRFSGSGSGTDYTLTISRLEPEDFAVYYCQQWSSYPLWTFGGGTKVEIK

SEQ ID NO: 858 - protein, 109 aa, synthetic construct
  REGION 1..109: note = Description of Artificial Sequence: Synthetic polypeptide
  REGION 1..109: note = 2G4[PD-L1]_L1.61
EIVLTQSPGTLSLSPGERATLSCRASLSIQSSNLHWYQQKPGQSPRLLIYGTNLLASGVPVRFSGSGSGTDYTLTISRLEPEDFAVYYCQQWSSYPLYTFGGGTKVEIK

SEQ ID NO: 859 - protein, 109 aa, synthetic construct
  REGION 1..109: note = Description of Artificial Sequence: Synthetic polypeptide
  REGION 1..109: note = 2G4[PD-L1]_L1.62
EIVLTQSPGTLSLSPGERATLSCRASSSIQSTNLHWYQQKPGQSPRLLIYGTSVLATGVPVRFSGSGSGTDYTLTISRLEPEDFAVYYCQQWSSYPLYTFGGGTKVEIK

SEQ ID NO: 860 - protein, 109 aa, synthetic construct
  REGION 1..109: note = Description of Artificial Sequence: Synthetic polypeptide
  REGION 1..109: note = 2G4[PD-L1]_L1.63
EIVLTQSPGTLSLSPGERATLSCRASSSISSSNLHWYQQKPGQSPRLLIYGTSNLASGVPVRFSGSGSGTDYTLTISRLEPEDFAVYYCQQWSSYPLYTFGGGTKVEIK

SEQ ID NO: 861 - protein, 109 aa, synthetic construct
  REGION 1..109: note = Description of Artificial Sequence: Synthetic polypeptide
  REGION 1..109: note = 2G4[PD-L1]_L1.64
EIVLTQSPGTLSLSPGERATLSCRVSSSISSTNLHWYQQKPGQSPRPLIYGTSVLATGVPVRFSGSGSGTDYTLTISRLEPEDFAVYYCQQWSSYPLYTFGGGTKVEIK

SEQ ID NO: 862 - protein, 109 aa, synthetic construct
  REGION 1..109: note = Description of Artificial Sequence: Synthetic polypeptide
  REGION 1..109: note = 2G4[PD-L1]_L1.65
EIVLTQSPGTLSLSPGERATLSCRVSSSIQSSNLHWYQQKPGQSPRPLIYGTSVLATGVPVRFSGSGSGTDYTLTISRLEPEDFAVYYCQQWSSYPLYTFGGGTKVEIK

SEQ ID NO: 863 - protein, 109 aa, synthetic construct
  REGION 1..109: note = Description of Artificial Sequence: Synthetic polypeptide
  REGION 1..109: note = 2G4[PD-L1]_L1.66
EIVLTQSPGTLSLSPGERATLSCRVSSSIQSTNLHWYQQKPGQSPRPLIYGTSNLATGVPVRFSGSGSGTDYTLTISRLEPEDFAVYYCQQWSSYPLYTFGGGTKVEIK

SEQ ID NO: 864 - protein, 109 aa, synthetic construct
  REGION 1..109: note = Description of Artificial Sequence: Synthetic polypeptide
  REGION 1..109: note = 2G4[PD-L1]_L1.67
EIVLTQSPGTLSLSPGERATLSCRVSSSIQSTNLHWYQQKPGQSPRPLIYGTSVLASGVPVRFSGSGSGTDYTLTISRLEPEDFAVYYCQQWSSYPLYTFGGGTKVEIK

SEQ ID NO: 865 - protein, 109 aa, synthetic construct
  REGION 1..109: note = Description of Artificial Sequence: Synthetic polypeptide
  REGION 1..109: note = 2G4[PD-L1]_L1.68
EIVLTQSPGTLSLSPGERATLSCRVSSSIQSTNLHWYQQKPGQSPRPLIYGTSNLASGVPVRFSGSGSGTDYTLTISRLEPEDFAVYYCQQWSSYPLYTFGGGTKVEIK

SEQ ID NO: 866 - protein, 109 aa, synthetic construct
  REGION 1..109: note = Description of Artificial Sequence: Synthetic polypeptide
  REGION 1..109: note = 2G4[PD-L1]_L1.69
EIVLTQSPGTLSLSPGERATLSCRVSSSISSSNLHWYQQKPGQSPRPLIYGTSVLATGVPVRFSGSGSGTDYTLTISRLEPEDFAVYYCQQWSSYPLYTFGGGTKVEIK

SEQ ID NO: 867 - protein, 109 aa, synthetic construct
  REGION 1..109: note = Description of Artificial Sequence: Synthetic polypeptide
  REGION 1..109: note = 2G4[PD-L1]_L1.70
EIVLTQSPGTLSLSPGERATLSCRVSSSIQSTNLHWYQQKPGQSPRPLIYGTSSLATGVPVRFSGSGSGTDYTLTISRLEPEDFAVYYCQQWSSYPLYTFGGGTKVEIK

SEQ ID NO: 868 - protein, 109 aa, synthetic construct
  REGION 1..109: note = Description of Artificial Sequence: Synthetic polypeptide
  REGION 1..109: note = 2G4[PD-L1]_L1.71
EIVLTQSPGTLSLSPGERATLSCRVSSSIQSTNLHWYQQKPGQSPRPLIYGTSTLATGVPVRFSGSGSGTDYTLTISRLEPEDFAVYYCQQWSSYPLYTFGGGTKVEIK

SEQ ID NO: 869 - protein, 220 aa, Homo sapiens
  REGION 1..220: note = sp|P10747|CD28_HUMAN T-cell-specific surface glycoprotein CD28 OS=Homo sapiens OX=9606 GN=CD28 PE=1; SV = 1 Human CD28 sequence
MLRLLLALNLFPSIQVTGNKILVKQSPMLVAYDNAVNLSCKYSYNLFSREFRASLHKGLDSAVEVCVVYGNYSQQLQVYSKTGFNCDGKLGNESVTFYLQNLYVNQTDIYFCKIEVMYPPPYLDNEKSNGTIIHVKGKHLCPSPLFPGPSKPFWVLVVVGGVLACYSLLVTVAFIIFWVRSKRSRLLHSDYMNMTPRRPGPTRKHYQPYAPPRDFAAYRS

SEQ ID NO: 870 - protein, 134 aa, Homo sapiens
  REGION 1..134: note = sp|P10747|19-152 Human CD28, extracellular domain
NKILVKQSPMLVAYDNAVNLSCKYSYNLFSREFRASLHKGLDSAVEVCVVYGNYSQQLQVYSKTGFNCDGKLGNESVTFYLQNLYVNQTDIYFCKIEVMYPPPYLDNEKSNGTIIHVKGKHLCPSPLFPGPSKP

SEQ ID NO: 871 - protein, 218 aa, Mus musculus
  REGION 1..218: note = sp|P31041|CD28_MOUSE T-cell-specific surface glycoprotein CD28 OS=Mus musculus OX=10090 GN=Cd28 PE=1; SV = 2 Mouse CD28 sequence
MTLRLLFLALNFFSVQVTENKILVKQSPLLVVDSNEVSLSCRYSYNLLAKEFRASLYKGVNSDVEVCVGNGNFTYQPQFRSNAEFNCDGDFDNETVTFRLWNLHVNHTDIYFCKIEFMYPPPYLDNERSNGTIIHIKEKHLCHTQSSPKLFWALVVVAGVLFCYGLLVTVALCVIWTNSRRNRLLQSDYMNMTPRRPGLTRKPYQPYAPARDFAAYRP

SEQ ID NO: 872 - protein, 131 aa, Mus musculus
  REGION 1..131: note = sp|P31041|20-150 Mouse CD28, extracellular domain
NKILVKQSPLLVVDSNEVSLSCRYSYNLLAKEFRASLYKGVNSDVEVCVGNGNFTYQPQFRSNAEFNCDGDFDNETVTFRLWNLHVNHTDIYFCKIEFMYPPPYLDNERSNGTIIHIKEKHLCHTQSSPKL

SEQ ID NO: 873 - protein, 220 aa, Macaca fascicularis
  REGION 1..220: note = tr|Q0PDN3|Q0PDN3_MACFA CD28 OS=Macaca fascicularis; OX = 9541 GN=CD 28 PE=2 SV=1 Cynomolgus CD28 sequence
MLRLLLALNLLPSIQVTGNKILVKQSPMLVAYDNAVNLSCKYSYNLFSREFRASLHKGLDSAVEVCVVYGNYSQQLQVYSKTGFNCDGKLGNESVTFYLQNLYVNQTDIYFCKIEVMYPPPYLDNEKSNGTIIHVKGKHLCPSPLFPGPSKPFWALVVVGGVLACYSLLVTVAFCIFWMRSKRSRLLHSDYMNMTPRRPGPTRKHYQPYAPPRDFAAYRS

SEQ ID NO: 874 - protein, 134 aa, Macaca fascicularis; identical to SEQ ID NO: 870
  REGION 1..134: note = tr|Q0PDN3|19-152 Cynomolgus CD28, extracellular domain

SEQ ID NO: 875 - protein, 584 aa, Macaca fascicularis
  REGION 1..584: note = XP_015308533.1 PREDICTED: CD276 antigen isoform X1 [Macaca fasci cularis] Cynomolgus CD28 sequence (predicted)
MKLSSDHVFPLFRKLQWLPAAFRIQFTPVSPSAGAAFHHGEPSCQLPHSKMLHRRGSPGMGVHVGAALGALWFCLTGALEVQVPEDPVVALVGTDATLRCSFSPEPGFSLAQLNLIWQLTDTKQLVHSFTEGRDQGSAYANRTALFLDLLAQGNASLRLQRVRVADEGSFTCFVSIRDFGSAAVSLQVAAPYSKPSMTLEPNKDLRPGDTVTITCSSYRGYPEAEVFWQDGQGAPLTGNVTTSQMANEQGLFDVHSVLRVVLGANGTYSCLVRNPVLQQDAHGSITITPQRSPTGAVEVQVPEDPVVALVGTDATLRCSFSPEPGFSLAQLNLIWQLTDTKQLVHSFTEGRDQGSAYANRTALFLDLLAQGNASLRLQRVRVADEGSFTCFVSIRDFGSAAVSLQVAAPYSKPSMTLEPNKDLRPGDTVTITCSSYRGYPEAEVFWQDGQGAPLTGNVTTSQMANEQGLFDVHSVLRVVLGANGTYSCLVRNPVLQQDAHGSVTITGQPMTFPPEALWVTVGLSVCLVALLVALAFVCWRKIKQSCEEENAGAEDQDGEGEGSKTALQPLKHSDSKEDDGQELA

SEQ ID NO: 876 - protein, 438 aa, Macaca fascicularis
  REGION 1..438: note = XP_015308533.1|79-516 Cynomolgus CD28, extracellular domain
LEVQVPEDPVVALVGTDATLRCSFSPEPGFSLAQLNLIWQLTDTKQLVHSFTEGRDQGSAYANRTALFLDLLAQGNASLRLQRVRVADEGSFTCFVSIRDFGSAAVSLQVAAPYSKPSMTLEPNKDLRPGDTVTITCSSYRGYPEAEVFWQDGQGAPLTGNVTTSQMANEQGLFDVHSVLRVVLGANGTYSCLVRNPVLQQDAHGSITITPQRSPTGAVEVQVPEDPVVALVGTDATLRCSFSPEPGFSLAQLNLIWQLTDTKQLVHSFTEGRDQGSAYANRTALFLDLLAQGNASLRLQRVRVADEGSFTCFVSIRDFGSAAVSLQVAAPYSKPSMTLEPNKDLRPGDTVTITCSSYRGYPEAEVFWQDGQGAPLTGNVTTSQMANEQGLFDVHSVLRVVLGANGTYSCLVRNPVLQQDAHGSVTITGQPMTFPPEA

SEQ ID NO: 877 - protein, 290 aa, Homo sapiens
  REGION 1..290: note = sp|Q9NZQ7 Human PDL1 sequence
MRIFAVFIFMTYWHLLNAFTVTVPKDLYVVEYGSNMTIECKFPVEKQLDLAALIVYWEMEDKNIIQFVHGEEDLKVQHSSYRQRARLLKDQLSLGNAALQITDVKLQDAGVYRCMISYGGADYKRITVKVNAPYNKINQRILVVDPVTSEHELTCQAEGYPKAEVIWTSSDHQVLSGKTTTTNSKREEKLFNVTSTLRINTTTNEIFYCTFRRLDPEENHTAELVIPELPLAHPPNERTHLVILGAILLCLGVALTFIFRLRKGRMMDVKKCGIQDTNSKKQSDTHLEET

SEQ ID NO: 878 - protein, 220 aa, Homo sapiens
  REGION 1..220: note = sp|Q9NZQ7|19-238 Human PDL1, extracellular domain
FTVTVPKDLYVVEYGSNMTIECKFPVEKQLDLAALIVYWEMEDKNIIQFVHGEEDLKVQHSSYRQRARLLKDQLSLGNAALQITDVKLQDAGVYRCMISYGGADYKRITVKVNAPYNKINQRILVVDPVTSEHELTCQAEGYPKAEVIWTSSDHQVLSGKTTTTNSKREEKLFNVTSTLRINTTTNEIFYCTFRRLDPEENHTAELVIPELPLAHPPNER

SEQ ID NO: 879 - protein, 290 aa, Mus musculus
  REGION 1..290: note = sp|Q9EP73 Mouse PDL1 sequence
MRIFAGIIFTACCHLLRAFTITAPKDLYVVEYGSNVTMECRFPVERELDLLALVVYWEKEDEQVIQFVAGEEDLKPQHSNFRGRASLPKDQLLKGNAALQITDVKLQDAGVYCCIISYGGADYKRITLKVNAPYRKINQRISVDPATSEHELICQAEGYPEAEVIWTNSDHQPVSGKRSVTTSRTEGMLLNVTSSLRVNATANDVFYCTFWRSQPGQNHTAELIIPELPATHPPQNRTHWVLLGSILLFLIVVSTVLLFLRKQVRMLDVEKCGVEDTSSKNRNDTQFEET

SEQ ID NO: 880 - protein, 221 aa, Mus musculus
  REGION 1..221: note = sp|Q9EP73|19-239 Mouse PDL1, extracellular domain
FTITAPKDLYVVEYGSNVTMECRFPVERELDLLALVVYWEKEDEQVIQFVAGEEDLKPQHSNFRGRASLPKDQLLKGNAALQITDVKLQDAGVYCCIISYGGADYKRITLKVNAPYRKINQRISVDPATSEHELICQAEGYPEAEVIWTNSDHQPVSGKRSVTTSRTEGMLLNVTSSLRVNATANDVFYCTFWRSQPGQNHTAELIIPELPATHPPQNRTH

SEQ ID NO: 881 - protein, 290 aa, Macaca fascicularis
  REGION 1..290: note = tr|G7PSE7 Cynomolgus PDL1 sequence
MRIFAVFIFTIYWHLLNAFTVTVPKDLYVVEYGSNMTIECKFPVEKQLDLTSLIVYWEMEDKNIIQFVHGEEDLKVQHSNYRQRAQLLKDQLSLGNAALRITDVKLQDAGVYRCMISYGGADYKRITVKVNAPYNKINQRILVVDPVTSEHELTCQAEGYPKAEVIWTSSDHQVLSGKTTTTNSKREEKLLNVTSTLRINTTANEIFYCIFRRLDPEENHTAELVIPELPLALPPNERTHLVILGAIFLLLGVALTFIFYLRKGRMMDMKKCGIRVTNSKKQRDTQLEET

SEQ ID NO: 882 - protein, 220 aa, Macaca fascicularis
  REGION 1..220: note = tr|G7PSE7|19-238 Cynomolgus PDL1, extracellular domain
FTVTVPKDLYVVEYGSNMTIECKFPVEKQLDLTSLIVYWEMEDKNIIQFVHGEEDLKVQHSNYRQRAQLLKDQLSLGNAALRITDVKLQDAGVYRCMISYGGADYKRITVKVNAPYNKINQRILVVDPVTSEHELTCQAEGYPKAEVIWTSSDHQVLSGKTTTTNSKREEKLLNVTSTLRINTTANEIFYCIFRRLDPEENHTAELVIPELPLALPPNER

SEQ ID NO: 883 - protein, 15 aa, synthetic construct
  REGION 1..15: note = Description of Artificial Sequence: Synthetic peptide
GGGGSGGGGSGGGGS

SEQ ID NO: 884 - protein, 18 aa, synthetic construct
  REGION 1..18: note = Description of Artificial Sequence: Synthetic peptide
GSTSGSGKPGSGEGSTKG

SEQ ID NO: 885 - protein, 14 aa, synthetic construct
  REGION 1..14: note = Description of Artificial Sequence: Synthetic peptide
IRPRAIGGSKPRVA

SEQ ID NO: 886 - protein, 15 aa, synthetic construct
  REGION 1..15: note = Description of Artificial Sequence: Synthetic peptide
GKGGSGKGGSGKGGS

SEQ ID NO: 887 - protein, 15 aa, synthetic construct
  REGION 1..15: note = Description of Artificial Sequence: Synthetic peptide
GGKGSGGKGSGGKGS

SEQ ID NO: 888 - protein, 15 aa, synthetic construct
  REGION 1..15: note = Description of Artificial Sequence: Synthetic peptide
GGGKSGGGKSGGGKS

SEQ ID NO: 889 - protein, 15 aa, synthetic construct
  REGION 1..15: note = Description of Artificial Sequence: Synthetic peptide
GKGKSGKGKSGKGKS

SEQ ID NO: 890 - protein, 15 aa, synthetic construct
  REGION 1..15: note = Description of Artificial Sequence: Synthetic peptide
GGGKSGGKGSGKGGS

SEQ ID NO: 891 - protein, 15 aa, synthetic construct
  REGION 1..15: note = Description of Artificial Sequence: Synthetic peptide
GKPGSGKPGSGKPGS

SEQ ID NO: 892 - protein, 20 aa, synthetic construct
  REGION 1..20: note = Description of Artificial Sequence: Synthetic peptide
GKPGSGKPGSGKPGSGKPGS

SEQ ID NO: 893 - protein, 20 aa, synthetic construct
  REGION 1..20: note = Description of Artificial Sequence: Synthetic peptide
GKGKSGKGKSGKGKSGKGKS

SEQ ID NO: 894 - protein, 20 aa, synthetic construct
  REGION 1..20: note = Description of Artificial Sequence: Synthetic peptide
GGGGSGGGGSGGGGSGGGGS

SEQ ID NO: 895 - protein, 14 aa, synthetic construct
  REGION 1..14: note = Description of Artificial Sequence: Synthetic peptide
STAGDTHLGGEDFD

SEQ ID NO: 896 - protein, 15 aa, synthetic construct
  REGION 1..15: note = Description of Artificial Sequence: Synthetic peptide
GEGGSGEGGSGEGGS

SEQ ID NO: 897 - protein, 15 aa, synthetic construct
  REGION 1..15: note = Description of Artificial Sequence: Synthetic peptide
GGEGSGGEGSGGEGS

SEQ ID NO: 898 - protein, 15 aa, synthetic construct
  REGION 1..15: note = Description of Artificial Sequence: Synthetic peptide
GGGESGGGESGGGES

SEQ ID NO: 899 - protein, 15 aa, synthetic construct
  REGION 1..15: note = Description of Artificial Sequence: Synthetic peptide
GEGESGEGESGEGES

SEQ ID NO: 900 - protein, 15 aa, synthetic construct
  REGION 1..15: note = Description of Artificial Sequence: Synthetic peptide
GGGESGGEGSGEGGS

SEQ ID NO: 901 - protein, 20 aa, synthetic construct
  REGION 1..20: note = Description of Artificial Sequence: Synthetic peptide
GEGESGEGESGEGESGEGES

SEQ ID NO: 902 - protein, 15 aa, synthetic construct
  REGION 1..15: note = Description of Artificial Sequence: Synthetic peptide
GGGGSGGGGSGGGGS

SEQ ID NO: 903 - protein, 20 aa, synthetic construct
  REGION 1..20: note = Description of Artificial Sequence: Synthetic peptide
GGGGSGGGGSGGGGSGGGGS

SEQ ID NO: 904 - protein, 18 aa, synthetic construct
  REGION 1..18: note = Description of Artificial Sequence: Synthetic peptide
GSTSGSGKPGSGEGSTKG

SEQ ID NO: 905 - protein, 19 aa, synthetic construct
  REGION 1..19: note = Description of Artificial Sequence: Synthetic peptide
PRGASKSGSASQTGSAPGS

SEQ ID NO: 906 - protein, 19 aa, synthetic construct
  REGION 1..19: note = Description of Artificial Sequence: Synthetic peptide
GTAAAGAGAAGGAAAGAAG

SEQ ID NO: 907 - protein, 19 aa, synthetic construct
  REGION 1..19: note = Description of Artificial Sequence: Synthetic peptide
GTSGSSGSGSGGSGSGGGG

SEQ ID NO: 908 - protein, 20 aa, synthetic construct
  REGION 1..20: note = Description of Artificial Sequence: Synthetic peptide
GKPGSGKPGSGKPGSGKPGS

SEQ ID NO: 909 - protein, 5 aa, synthetic construct
  REGION 1..5: note = Description of Artificial Sequence: Synthetic peptide
GGGGS

SEQ ID NO: 910 - protein, 10 aa, synthetic construct
  REGION 1..10: note = Description of Artificial Sequence: Synthetic peptide
GGGGSGGGGS

SEQ ID NO: 911 - protein, 15 aa, synthetic construct
  REGION 1..15: note = Description of Artificial Sequence: Synthetic peptide
GGGGSGGGGSGGGGS

SEQ ID NO: 912 - protein, 20 aa, synthetic construct
  REGION 1..20: note = Description of Artificial Sequence: Synthetic peptide
GGGGSGGGGSGGGGSGGGGS

SEQ ID NO: 913 - protein, 25 aa, synthetic construct
  REGION 1..25: note = Description of Artificial Sequence: Synthetic peptide
GGGGSGGGGSGGGGSGGGGSGGGGS

SEQ ID NO: 914 - protein, 30 aa, synthetic construct
  REGION 1..30: note = Description of Artificial Sequence: Synthetic polypeptide
GGGGSGGGGSGGGGSGGGGSGGGGSGGGGS

SEQ ID NO: 915 - protein, 35 aa, synthetic construct
  REGION 1..35: note = Description of Artificial Sequence: Synthetic polypeptide
GGGGSGGGGSGGGGSGGGGSGGGGSGGGGSGGGGS

SEQ ID NO: 916 - protein, 5 aa, synthetic construct
  REGION 1..5: note = Description of Artificial Sequence: Synthetic peptide
GGGGA

SEQ ID NO: 917 - protein, 10 aa, synthetic construct
  REGION 1..10: note = Description of Artificial Sequence: Synthetic peptide
GGGGAGGGGA

SEQ ID NO: 918 - protein, 15 aa, synthetic construct
  REGION 1..15: note = Description of Artificial Sequence: Synthetic peptide
GGGGAGGGGAGGGGA

SEQ ID NO: 919 - protein, 20 aa, synthetic construct
  REGION 1..20: note = Description of Artificial Sequence: Synthetic peptide
GGGGAGGGGAGGGGAGGGGA

SEQ ID NO: 920 - protein, 25 aa, synthetic construct
  REGION 1..25: note = Description of Artificial Sequence: Synthetic peptide
GGGGAGGGGAGGGGAGGGGAGGGGA

SEQ ID NO: 921 - protein, 30 aa, synthetic construct
  REGION 1..30: note = Description of Artificial Sequence: Synthetic polypeptide
GGGGAGGGGAGGGGAGGGGAGGGGAGGGGA

SEQ ID NO: 922 - protein, 35 aa, synthetic construct
  REGION 1..35: note = Description of Artificial Sequence: Synthetic polypeptide
GGGGAGGGGAGGGGAGGGGAGGGGAGGGGAGGGGA

SEQ ID NO: 923 - protein, 30 aa, synthetic construct
  REGION 1..30: note = Description of Artificial Sequence: Synthetic polypeptide
DPALVHQRPAPPGGGGSGGGGSGGGGSGGG

SEQ ID NO: 924 - protein, 5 aa, synthetic construct
  REGION 1..5: note = Description of Artificial Sequence: Synthetic peptide
GKPGS

SEQ ID NO: 925 - protein, 25 aa, synthetic construct
  REGION 1..25: note = Description of Artificial Sequence: Synthetic peptide
GKPGSGKPGSGKPGSGKPGSGKPGS

SEQ ID NO: 926 - protein, 30 aa, synthetic construct
  REGION 1..30: note = Description of Artificial Sequence: Synthetic polypeptide
GKPGSGKPGSGKPGSGKPGSGKPGSGKPGS

SEQ ID NO: 927 - protein, 5 aa, synthetic construct
  REGION 1..5: note = Description of Artificial Sequence: Synthetic peptide
GGGES

SEQ ID NO: 928 - protein, 9 aa, synthetic construct
  REGION 1..9: note = Description of Artificial Sequence: Synthetic peptide
KTHTCPPCP

SEQ ID NO: 929 - protein, 15 aa, synthetic construct
  REGION 1..15: note = Description of Artificial Sequence: Synthetic peptide
EPKSSDKTHTCPPCP

SEQ ID NO: 930 - protein, 19 aa, synthetic construct
  REGION 1..19: note = Description of Artificial Sequence: Synthetic peptide
GGGGSGGGGSKTHTCPPCP

SEQ ID NO: 931 - protein, 19 aa, synthetic construct
  REGION 1..19: note = Description of Artificial Sequence: Synthetic peptide
GKPGSGKPGSKTHTCPPCP

SEQ ID NO: 932 - protein, 14 aa, synthetic construct
  REGION 1..14: note = Description of Artificial Sequence: Synthetic peptide
GKPGSKTHTCPPCP

SEQ ID NO: 933 - protein, 5 aa, synthetic construct
  REGION 1..5: note = Description of Artificial Sequence: Synthetic peptide
EPKSC

SEQ ID NO: 934 - protein, 15 aa, synthetic construct
  REGION 1..15: note = Description of Artificial Sequence: Synthetic peptide
EPKSCGGGGSGGGGS

SEQ ID NO: 935 - protein, 15 aa, synthetic construct
  REGION 1..15: note = Description of Artificial Sequence: Synthetic peptide
EPKSCGKPGSGKPGS

SEQ ID NO: 936 - protein, 10 aa, synthetic construct
  REGION 1..10: note = Description of Artificial Sequence: Synthetic peptide
EPKSCGKPGS

SEQ ID NO: 937 - protein, 216 aa, synthetic construct
  REGION 1..216: note = Description of Artificial Sequence: Synthetic polypeptide
  REGION 1..216: note = Heterodimeric Fc Backbone 1 monomer 1 (-)
APPVAGPSVFLFPPKPKDTLMISRTPEVTCVVVDVKHEDPEVKFNWYVDGVEVHNAKTKPREEEYNSTYRVVSVLTVLHQDWLNGKEYKCKVSNKALPAPIEKTISKAKGQPREPQVYTLPPSREEMTKNQVSLTCDVSGFYPSDIAVEWESDGQPENNYKTTPPVLDSDGSFFLYSKLTVDKSRWEQGDVFSCSVMHEALHNHYTQKSLSLSPGK

SEQ ID NO: 938 - protein, 216 aa, synthetic construct
  REGION 1..216: note = Description of Artificial Sequence: Synthetic polypeptide
  REGION 1..216: note = Heterodimeric Fc Backbone 1 monomer 2 (+)
APPVAGPSVFLFPPKPKDTLMISRTPEVTCVVVDVKHEDPEVKFNWYVDGVEVHNAKTKPREEQYNSTYRVVSVLTVLHQDWLNGKEYKCKVSNKALPAPIEKTISKAKGQPREPQVYTLPPSREQMTKNQVKLTCLVKGFYPSDIAVEWESNGQPENNYKTTPPVLDSDGSFFLYSKLTVDKSRWQQGNVFSCSVMHEALHNHYTQKSLSLSPGK

SEQ ID NO: 939 - protein, 216 aa, synthetic construct; identical to SEQ ID NO: 937
  REGION 1..216: note = Description of Artificial Sequence: Synthetic polypeptide
  REGION 1..216: note = Heterodimeric Fc Backbone 2 monomer 1 (-)

SEQ ID NO: 940 - protein, 216 aa, synthetic construct
  REGION 1..216: note = Description of Artificial Sequence: Synthetic polypeptide
  REGION 1..216: note = Heterodimeric Fc Backbone monomer 2 (+)
APPVAGPSVFLFPPKPKDTLMISRTPEVTCVVVDVKHEDPEVKFNWYVDGVEVHNAKTKPREEQYNSTYRVVSVLTVLHQDWLNGKEYKCKVSNKALPAPIEKTISKAKGQPREPQVYTLPPSREEMTKNQVKLTCLVKGFYPSDIAVEWESNGQPENNYKTTPPVLDSDGSFFLYSKLTVDKSRWQQGNVFSCSVMHEALHNHYTQKSLSLSPGK

SEQ ID NO: 941 - protein, 216 aa, synthetic construct
  REGION 1..216: note = Description of Artificial Sequence: Synthetic polypeptide
  REGION 1..216: note = Heterodimeric Fc Backbone 3 monomer 1 (-)
APPVAGPSVFLFPPKPKDTLMISRTPEVTCVVVDVKHEDPEVKFNWYVDGVEVHNAKTKPREEEYNSTYRVVSVLTVLHQDWLNGKEYKCKVSNKALPAPIEKTISKAKGQPREPQVYTLPPSREEMTKNQVSLTCEVSGFYPSDIAVEWESDGQPENNYKTTPPVLDSDGSFFLYSKLTVDKSRWEQGDVFSCSVMHEALHNHYTQKSLSLSPGK

SEQ ID NO: 942 - protein, 216 aa, synthetic construct; identical to SEQ ID NO: 940
  REGION 1..216: note = Description of Artificial Sequence: Synthetic polypeptide
  REGION 1..216: note = Heterodimeric Fc Backbone 3 monomer 2 (+)

SEQ ID NO: 943 - protein, 216 aa, synthetic construct
  REGION 1..216: note = Description of Artificial Sequence: Synthetic polypeptide
  REGION 1..216: note = Heterodimeric Fc Backbone 4 monomer 1 (-)
APPVAGPSVFLFPPKPKDTLMISRTPEVTCVVVDVKHEDPEVKFNWYVDGVEVHNAKTKPREEEYNSTYRVVSVLTVLHQDWLNGKEYKCKVSNKALPAPIEKTISKAKGQPREPQVYTLPPSREEMTENEVSLTCLVKGFYPSDIAVEWESDGQPENNYKTTPPVLDSDGSFFLYSKLEVDKSRWEQGDVFSCSVMHEALHNHYTQKSLSLSPGK

SEQ ID NO: 944 - protein, 216 aa, synthetic construct
  REGION 1..216: note = Description of Artificial Sequence: Synthetic polypeptide
  REGION 1..216: note = Heterodimeric Fc Backbone 4 monomer 2 (+)
APPVAGPSVFLFPPKPKDTLMISRTPEVTCVVVDVKHEDPEVKFNWYVDGVEVHNAKTKPREEQYNSTYRVVSVLTVLHQDWLNGKEYKCKVSNKALPAPIEKTISKAKGQPREPQVYTLPPSREEMTKNQVSLTCLVKGFYPSDIAVEWESNGQPENNYKTTPPVLDSKGSFFLYSKLTVDKSRWQQGNVFSCSVMHEALHNHYTQKSLSLSPGK

SEQ ID NO: 945 - protein, 216 aa, synthetic construct
  REGION 1..216: note = Description of Artificial Sequence: Synthetic polypeptide
  REGION 1..216: note = Heterodimeric Fc Backbone 5 monomer 1 (-)
APPVAGPSVFLFPPKPKDTLMISRTPEVTCVVVDVKHEDPEVKFNWYVDGVEVHNAKTKPREEEYNSTYRVVSVLTVLHQDWLNGKEYKCKVSNKALPAPIEKTISKAKGQPREPQVYTLPPSRDELTKNQVSLTCDVSGFYPSDIAVEWESDGQPENNYKTTPPVLDSDGSFFLYSKLTVDKSRWEQGDVFSCSVMHEALHNHYTQKSLSLSPGK

SEQ ID NO: 946 - protein, 216 aa, synthetic construct
  REGION 1..216: note = Description of Artificial Sequence: Synthetic polypeptide
  REGION 1..216: note = Heterodimeric Fc Backbone 5 monomer 2 (+)
APPVAGPSVFLFPPKPKDTLMISRTPEVTCVVVDVKHEDPEVKFNWYVDGVEVHNAKTKPREEQYNSTYRVVSVLTVLHQDWLNGKEYKCKVSNKALPAPIEKTISKAKGQPREPQVYTLPPSRDQLTKNQVKLTCLVKGFYPSDIAVEWESNGQPENNYKTTPPVLDSDGSFFLYSKLTVDKSRWQQGNVFSCSVMHEALHNHYTQKSLSLSPGK

SEQ ID NO: 947 - protein, 216 aa, synthetic construct
  REGION 1..216: note = Description of Artificial Sequence: Synthetic polypeptide
  REGION 1..216: note = Heterodimeric Fc Backbone 6 monomer 1 (-)
APPVAGPSVFLFPPKPKDTLMISRTPEVTCVVVDVKHEDPEVKFNWYVDGVEVHNAKTKPREEEYASTYRVVSVLTVLHQDWLNGKEYKCKVSNKALPAPIEKTISKAKGQPREPQVYTLPPSREEMTKNQVSLTCDVSGFYPSDIAVEWESDGQPENNYKTTPPVLDSDGSFFLYSKLTVDKSRWEQGDVFSCSVMHEALHNHYTQKSLSLSPGK

SEQ ID NO: 948 - protein, 216 aa, synthetic construct
  REGION 1..216: note = Description of Artificial Sequence: Synthetic polypeptide
  REGION 1..216: note = Heterodimeric Fc Backbone 6 monomer 2 (+)
APPVAGPSVFLFPPKPKDTLMISRTPEVTCVVVDVKHEDPEVKFNWYVDGVEVHNAKTKPREEQYASTYRVVSVLTVLHQDWLNGKEYKCKVSNKALPAPIEKTISKAKGQPREPQVYTLPPSREQMTKNQVKLTCLVKGFYPSDIAVEWESNGQPENNYKTTPPVLDSDGSFFLYSKLTVDKSRWQQGNVFSCSVMHEALHNHYTQKSLSLSPGK

SEQ ID NO: 949 - protein, 216 aa, synthetic construct
  REGION 1..216: note = Description of Artificial Sequence: Synthetic polypeptide
  REGION 1..216: note = Heterodimeric Fc Backbone 7 monomer 1 (-)
APPVAGPSVFLFPPKPKDTLMISRTPEVTCVVVDVKHEDPEVKFNWYVDGVEVHNAKTKPREEEYSSTYRVVSVLTVLHQDWLNGKEYKCKVSNKALPAPIEKTISKAKGQPREPQVYTLPPSREEMTKNQVSLTCDVSGFYPSDIAVEWESDGQPENNYKTTPPVLDSDGSFFLYSKLTVDKSRWEQGDVFSCSVMHEALHNHYTQKSLSLSPGK

SEQ ID NO: 950 - protein, 216 aa, synthetic construct
  REGION 1..216: note = Description of Artificial Sequence: Synthetic polypeptide
  REGION 1..216: note = Heterodimeric Fc Backbone 7 monomer 2 (+)
APPVAGPSVFLFPPKPKDTLMISRTPEVTCVVVDVKHEDPEVKFNWYVDGVEVHNAKTKPREEQYSSTYRVVSVLTVLHQDWLNGKEYKCKVSNKALPAPIEKTISKAKGQPREPQVYTLPPSREQMTKNQVKLTCLVKGFYPSDIAVEWESNGQPENNYKTTPPVLDSDGSFFLYSKLTVDKSRWQQGNVFSCSVMHEALHNHYTQKSLSLSPGK

SEQ ID NO: 951 - protein, 217 aa, synthetic construct
  REGION 1..217: note = Description of Artificial Sequence: Synthetic polypeptide
  REGION 1..217: note = Heterodimeric Fc Backbone 8 monomer 1 (-)
APEFLGGPSVFLFPPKPKDTLMISRTPEVTCVVVDVSQEDPEVQFNWYVDGVEVHNAKTKPREEEFNSTYRVVSVLTVLHQDWLNGKEYKCKVSNKGLPSSIEKTISKAKGQPREPQVYTLPPSQEEMTKNQVSLTCDVSGFYPSDIAVEWESDGQPENNYKTTPPVLDSDGSFFLYSRLTVDKSRWEEGDVFSCSVMHEALHNHYTQKSLSLSLGK

SEQ ID NO: 952 - protein, 217 aa, synthetic construct
  REGION 1..217: note = Description of Artificial Sequence: Synthetic polypeptide
  REGION 1..217: note = Heterodimeric Fc Backbone 8 monomer 2 (+)
APEFLGGPSVFLFPPKPKDTLMISRTPEVTCVVVDVSQEDPEVQFNWYVDGVEVHNAKTKPREEQFNSTYRVVSVLTVLHQDWLNGKEYKCKVSNKGLPSSIEKTISKAKGQPREPQVYTLPPSQEQMTKNQVKLTCLVKGFYPSDIAVEWESNGQPENNYKTTPPVLDSDGSFFLYSRLTVDKSRWQEGNVFSCSVMHEALHNHYTQKSLSLSLGK

SEQ ID NO: 953 - protein, 216 aa, synthetic construct
  REGION 1..216: note = Description of Artificial Sequence: Synthetic polypeptide
  REGION 1..216: note = Heterodimeric Fc Backbone 9 monomer 1 (-)
APPVAGPSVFLFPPKPKDTLMISRTPEVTCVVVDVSHEDPEVQFNWYVDGVEVHNAKTKPREEEFNSTFRVVSVLTVVHQDWLNGKEYKCKVSNKGLPAPIEKTISKTKGQPREPQVYTLPPSREEMTKNQVSLTCDVSGFYPSDIAVEWESDGQPENNYKTTPPMLDSDGSFFLYSKLTVDKSRWEQGDVFSCSVMHEALHNHYTQKSLSLSPGK

SEQ ID NO: 954 - protein, 216 aa, synthetic construct
  REGION 1..216: note = Description of Artificial Sequence: Synthetic polypeptide
  REGION 1..216: note = Heterodimeric Fc Backbone 9 monomer 2 (+)
APPVAGPSVFLFPPKPKDTLMISRTPEVTCVVVDVSHEDPEVQFNWYVDGVEVHNAKTKPREEQFNSTFRVVSVLTVVHQDWLNGKEYKCKVSNKGLPAPIEKTISKTKGQPREPQVYTLPPSREQMTKNQVKLTCLVKGFYPSDIAVEWESNGQPENNYKTTPPMLDSDGSFFLYSKLTVDKSRWQQGNVFSCSVMHEALHNHYTQKSLSLSPGK

SEQ ID NO: 955 - protein, 216 aa, synthetic construct
  REGION 1..216: note = Description of Artificial Sequence: Synthetic polypeptide
  REGION 1..216: note = Heterodimeric Fc Backbone 10 monomer 1 (-)
APPVAGPSVFLFPPKPKDTLMISRTPEVTCVVVDVKHEDPEVQFNWYVDGVEVHNAKTKPREEEFNSTFRVVSVLTVVHQDWLNGKEYKCKVSNKGLPAPIEKTISKTKGQPREPQVYTLPPSREEMTKNQVSLTCDVSGFYPSDIAVEWESDGQPENNYKTTPPMLDSDGSFFLYSKLTVDKSRWEQGDVFSCSVMHEALHNHYTQKSLSLSPGK

SEQ ID NO: 956 - protein, 216 aa, synthetic construct
  REGION 1..216: note = Description of Artificial Sequence: Synthetic polypeptide
  REGION 1..216: note = Heterodimeric Fc Backbone 10 monomer 2 (+)
APPVAGPSVFLFPPKPKDTLMISRTPEVTCVVVDVKHEDPEVQFNWYVDGVEVHNAKTKPREEQFNSTFRVVSVLTVVHQDWLNGKEYKCKVSNKGLPAPIEKTISKTKGQPREPQVYTLPPSREQMTKNQVKLTCLVKGFYPSDIAVEWESNGQPENNYKTTPPMLDSDGSFFLYSKLTVDKSRWQQGNVFSCSVMHEALHNHYTQKSLSLSPGK

SEQ ID NO: 957 - protein, 216 aa, synthetic construct
  REGION 1..216: note = Description of Artificial Sequence: Synthetic polypeptide
  REGION 1..216: note = Heterodimeric Fc Backbone 11 monomer 1 (-)
APPVAGPSVFLFPPKPKDTLMISRTPEVTCVVVDVKHEDPEVKFNWYVDGVEVHNAKTKPREEEYNSTYRVVSVLTVLHQDWLNGKEYKCKVSNKALPAPIEKTISKAKGQPREPQVYTLPPSREEMTKNQVSLTCDVSGFYPSDIAVEWESDGQPENNYKTTPPVLDSDGSFFLYSKLTVDKSRWEQGDVFSCSVLHEALHSHYTQKSLSLSPGK

SEQ ID NO: 958 - protein, 216 aa, synthetic construct
  REGION 1..216: note = Description of Artificial Sequence: Synthetic polypeptide
  REGION 1..216: note = Heterodimeric Fc Backbone 11 monomer 2 (+)
APPVAGPSVFLFPPKPKDTLMISRTPEVTCVVVDVKHEDPEVKFNWYVDGVEVHNAKTKPREEQYNSTYRVVSVLTVLHQDWLNGKEYKCKVSNKALPAPIEKTISKAKGQPREPQVYTLPPSREQMTKNQVKLTCLVKGFYPSDIAVEWESNGQPENNYKTTPPVLDSDGSFFLYSKLTVDKSRWQQGNVFSCSVLHEALHSHYTQKSLSLSPGK

SEQ ID NO: 959 - protein, 216 aa, synthetic construct
  REGION 1..216: note = Description of Artificial Sequence: Synthetic polypeptide
  REGION 1..216: note = Heterodimeric Fc Backbone 12 monomer 1 (-)
APPVAGPSVFLFPPKPKDTLMISRTPEVTCVVVDVKHEDPEVKFKWYVDGVEVHNAKTKPREEQYNSTYRVVSVLTVLHQDWLNGKEYKCKVSNKALPAPIEKTISKAKGQPREPQVYTLPPSREQMTKNQVKLTCLVKGFYPSDIAVEWESNGQPENNYKTTPPVLDSDGSFFLYSKLTVDKSRWQQGNVFSCSVMHEALHNHYTQKSLSLSPGK

SEQ ID NO: 960 - protein, 216 aa, synthetic construct; identical to SEQ ID NO: 937
  REGION 1..216: note = Description of Artificial Sequence: Synthetic polypeptide
  REGION 1..216: note = Heterodimeric Fc Backbone 12 monomer 2 (+)

SEQ ID NO: 961 - protein, 216 aa, synthetic construct; identical to SEQ ID NO: 937
  REGION 1..216: note = Description of Artificial Sequence: Synthetic polypeptide
  REGION 1..216: note = 2 + 1 mAb-scFv Heterodimeric Fc Backbone monomer 1 (-)

SEQ ID NO: 962 - protein, 215 aa, synthetic construct
  REGION 1..215: note = Description of Artificial Sequence: Synthetic polypeptide
  REGION 1..215: note = 2 + 1 mAb-scFv Heterodimeric Fc Backbone monomer 2 (+)
APPVAGPSVFLFPPKPKDTLMISRTPEVTCVVVDVKHEDPEVKFNWYVDGVEVHNAKTKPREEQYNSTYRVVSVLTVLHQDWLNGKEYKCKVSNKALPAPIEKTISKAKGQPREPQVYTLPPSREQMTKNQVKLTCLVKGFYPSDIAVEWESNGQPENNYKTTPPVLDSDGSFFLYSKLTVDKSRWQQGNVFSCSVMHEALHNHYTQKSLSLSPG

SEQ ID NO: 963 - protein, 113 aa, synthetic construct
  REGION 1..113: note = Description of Artificial Sequence: Synthetic polypeptide
  REGION 1..113: note = IgG1 CH1(+) + hinge
ASTKGPSVFPLAPSSKSTSGGTAALGCLVKDYFPEPVTVSWNSGALTSGVHTFPAVLQSSGLYSLSSVVTVPSSSLGTQTYICNVNHKPSNTKVDKKVEPKSCDKTHTCPPCP

SEQ ID NO: 964 - protein, 113 aa, synthetic construct
  REGION 1..113: note = Description of Artificial Sequence: Synthetic polypeptide
  REGION 1..113: note = IgG1 CH1(-) + hinge
ASTKGPSVFPLAPSSKSTSGGTAALGCLVKDYFPEPVTVSWNSGALTSGVHTFPAVLQSSGLYSLSSVVTVPSSSLGTQTYICNVNHKPSDTKVDKKVEPKSCDKTHTCPPCP

SEQ ID NO: 965 - protein, 110 aa, synthetic construct
  REGION 1..110: note = Description of Artificial Sequence: Synthetic polypeptide
  REGION 1..110: note = IgG2 CH1(+) + hinge
ASTKGPSVFPLAPCSRSTSESTAALGCLVKDYFPEPVTVSWNSGALTSGVHTFPAVLQSSGLYSLSSVVTVPSSNFGTQTYTCNVDHKPSNTKVDKTVERKCCVECPPCP

SEQ ID NO: 966 - protein, 110 aa, synthetic construct
  REGION 1..110: note = Description of Artificial Sequence: Synthetic polypeptide
  REGION 1..110: note = IgG2 CH1(-) + hinge
ASTKGPSVFPLAPCSRSTSESTAALGCLVKDYFPEPVTVSWNSGALTSGVHTFPAVLQSSGLYSLSSVVTVPSSNFGTQTYTCNVDHKPSDTKVDKTVERKCCVECPPCP

SEQ ID NO: 967 - protein, 110 aa, synthetic construct
  REGION 1..110: note = Description of Artificial Sequence: Synthetic polypeptide
  REGION 1..110: note = IgG4 CH1(+) + hinge
ASTKGPSVFPLAPCSRSTSESTAALGCLVKDYFPEPVTVSWNSGALTSGVHTFPAVLQSSGLYSLSSVVTVPSSSLGTKTYTCNVDHKPSNTKVDKRVESKYGPPCPSCP

SEQ ID NO: 968 - protein, 110 aa, synthetic construct
  REGION 1..110: note = Description of Artificial Sequence: Synthetic polypeptide
  REGION 1..110: note = IgG4 CH1(-) + hinge
ASTKGPSVFPLAPCSRSTSESTAALGCLVKDYFPEPVTVSWNSGALTSGVHTFPAVLQSSGLYSLSSVVTVPSSSLGTKTYTCNVDHKPSDTKVDKRVESKYGPPCPSCP

SEQ ID NO: 969 - protein, 103 aa, synthetic construct
  REGION 1..103: note = Description of Artificial Sequence: Synthetic polypeptide
  REGION 1..103: note = IgG1 CH1(+) + half hinge
ASTKGPSVFPLAPSSKSTSGGTAALGCLVKDYFPEPVTVSWNSGALTSGVHTFPAVLQSSGLYSLSSVVTVPSSSLGTQTYICNVNHKPSNTKVDKKVEPKSC

SEQ ID NO: 970 - protein, 103 aa, synthetic construct
  REGION 1..103: note = Description of Artificial Sequence: Synthetic polypeptide
  REGION 1..103: note = IgG1 CH1(-) + half hinge
ASTKGPSVFPLAPSSKSTSGGTAALGCLVKDYFPEPVTVSWNSGALTSGVHTFPAVLQSSGLYSLSSVVTVPSSSLGTQTYICNVNHKPSDTKVDKKVEPKSC

SEQ ID NO: 971 - protein, 98 aa, synthetic construct
  REGION 1..98: note = Description of Artificial Sequence: Synthetic polypeptide
  REGION 1..98: note = IgG1 CH1(+)
ASTKGPSVFPLAPSSKSTSGGTAALGCLVKDYFPEPVTVSWNSGALTSGVHTFPAVLQSSGLYSLSSVVTVPSSSLGTQTYICNVNHKPSNTKVDKKV

SEQ ID NO: 972 - protein, 98 aa, synthetic construct
  REGION 1..98: note = Description of Artificial Sequence: Synthetic polypeptide
  REGION 1..98: note = IgG1 CH1(-)
ASTKGPSVFPLAPSSKSTSGGTAALGCLVKDYFPEPVTVSWNSGALTSGVHTFPAVLQSSGLYSLSSVVTVPSSSLGTQTYICNVNHKPSDTKVDKKV

SEQ ID NO: 973 - protein, 98 aa, synthetic construct
  REGION 1..98: note = Description of Artificial Sequence: Synthetic polypeptide
  REGION 1..98: note = IgG2 CH1(+)
ASTKGPSVFPLAPCSRSTSESTAALGCLVKDYFPEPVTVSWNSGALTSGVHTFPAVLQSSGLYSLSSVVTVPSSNFGTQTYTCNVDHKPSNTKVDKTV

SEQ ID NO: 974 - protein, 98 aa, synthetic construct
  REGION 1..98: note = Description of Artificial Sequence: Synthetic polypeptide
  REGION 1..98: note = IgG2 CH1(-)
ASTKGPSVFPLAPCSRSTSESTAALGCLVKDYFPEPVTVSWNSGALTSGVHTFPAVLQSSGLYSLSSVVTVPSSNFGTQTYTCNVDHKPSDTKVDKTV

SEQ ID NO: 975 - protein, 98 aa, synthetic construct
  REGION 1..98: note = Description of Artificial Sequence: Synthetic polypeptide
  REGION 1..98: note = IgG4 CH1(+)
ASTKGPSVFPLAPCSRSTSESTAALGCLVKDYFPEPVTVSWNSGALTSGVHTFPAVLQSSGLYSLSSVVTVPSSSLGTKTYTCNVDHKPSNTKVDKRV

SEQ ID NO: 976 - protein, 98 aa, synthetic construct
  REGION 1..98: note = Description of Artificial Sequence: Synthetic polypeptide
  REGION 1..98: note = IgG4 CH1(-)
ASTKGPSVFPLAPCSRSTSESTAALGCLVKDYFPEPVTVSWNSGALTSGVHTFPAVLQSSGLYSLSSVVTVPSSSLGTKTYTCNVDHKPSDTKVDKRV

SEQ ID NO: 977 - protein, 15 aa, synthetic construct
  REGION 1..15: note = Description of Artificial Sequence: Synthetic peptide
  REGION 1..15: note = IgG1 hinge
EPKSCDKTHTCPPCP

SEQ ID NO: 978 - protein, 12 aa, synthetic construct
  REGION 1..12: note = Description of Artificial Sequence: Synthetic peptide
  REGION 1..12: note = IgG2 hinge
ERKCCVECPPCP

SEQ ID NO: 979 - protein, 12 aa, synthetic construct
  REGION 1..12: note = Description of Artificial Sequence: Synthetic peptide
  REGION 1..12: note = IgG4 hinge
ESKYGPPCPSCP

SEQ ID NO: 980 - protein, 107 aa, synthetic construct [sequence omitted]

SEQ ID NO: 981 - protein, 106 aa, synthetic construct
  REGION 1..106: note = Description of Artificial Sequence: Synthetic polypeptide
  REGION 1..106: note = Light Chain Constant Domain - Lambda
GQPKAAPSVTLFPPSSEELQANKATLVCLISDFYPGAVTVAWKADSSPVKAGVETTTPSKQSNNKYAASSYLSLTPEQWKSHRSYSCQVTHEGSTVEKTVAPTECS

SEQ ID NO: 982 - protein, 442 aa, synthetic construct
  REGION 1..442: note = Description of Artificial Sequence: Synthetic polypeptide
  REGION 1..442: note = XENP16432 Heavy Chain
QVQLVESGGGVVQPGRSLRLDCKASGITFSNSGMHWVRQAPGKGLEWVAVIWYDGSKRYYADSVKGRFTISRDNSKNTLFLQMNSLRAEDTAVYYCATNDDYWGQGTLVTVSSASTKGPSVFPLAPSSKSTSGGTAALGCLVKDYFPEPVTVSWNSGALTSGVHTFPAVLQSSGLYSLSSVVTVPSSSLGTQTYICNVNHKPSNTKVDKKVEPKSCDKTHTCPPCPAPPVAGPSVFLFPPKPKDTLMISRTPEVTCVVVDVKHEDPEVKFNWYVDGVEVHNAKTKPREEQYNSTYRVVSVLTVLHQDWLNGKEYKCKVSNKALPAPIEKTISKAKGQPREPQVYTLPPSREEMTKNQVSLTCLVKGFYPSDIAVEWESNGQPENNYKTTPPVLDSDGSFFLYSKLTVDKSRWQQGNVFSCSVMHEALHNHYTQKSLSLSPGK

SEQ ID NO: 983 - protein, 214 aa, synthetic construct
  REGION 1..214: note = Description of Artificial Sequence: Synthetic polypeptide
  REGION 1..214: note = XENP16432 Light Chain
EIVLTQSPATLSLSPGERATLSCRASQSVSSYLAWYQQKPGQAPRLLIYDASNRATGIPARFSGSGSGTDFTLTISSLEPEDFAVYYCQQSSNWPRTFGQGTKVEIKRTVAAPSVFIFPPSDEQLKSGTASVVCLLNNFYPREAKVQWKVDNALQSGNSQESVTEQDSKDSTYSLSSTLTLSKADYEKHKVYACEVTHQGLSSPVTKSFNRGEC

SEQ ID NO: 984 - protein, 121 aa, synthetic construct
  REGION 1..121: note = Description of Artificial Sequence: Synthetic polypeptide
  REGION 1..121: note = 1A7[CD28]_H1L1 Variable heavy (vh) domain
EVQLLESGGGLVQPGGSLRLSCAASGFTFSSYAMSWVRQAPGKGLEWVSTISGSGDSTYYADSVKGRFTISRDNSKNTLYLQMNSLRAEDTAVYYCAKSGPGLRQVGFDYWGQGTLVTVSS

SEQ ID NO: 985 - protein, 5 aa, synthetic construct
  REGION 1..5: note = Description of Artificial Sequence: Synthetic peptide
  REGION 1..5: note = 1A7[CD28]_H1L1 vhCDR1
SYAMS

SEQ ID NO: 986 - protein, 17 aa, synthetic construct
  REGION 1..17: note = Description of Artificial Sequence: Synthetic peptide
  REGION 1..17: note = 1A7[CD28]_H1L1 vhCDR2
TISGSGDSTYYADSVKG

SEQ ID NO: 987 - protein, 12 aa, synthetic construct
  REGION 1..12: note = Description of Artificial Sequence: Synthetic peptide
  REGION 1..12: note = 1A7[CD28]_H1L1 vhCDR3
SGPGLRQVGFDY

SEQ ID NO: 988 - protein, 107 aa, synthetic construct
  REGION 1..107: note = Description of Artificial Sequence: Synthetic polypeptide
  REGION 1..107: note = 1A7[CD28]_H1L1 Variable light (vl) domain
DIQMTQSPSSLSASVGDRVTITCRASQSISSYLNWYQQKPGKAPKLLIYAASSLQSGVPSRFSGSGSGTDFTLTISSLQPEDFATYYCQQSYSTPFTFGQGTKLEIK

SEQ ID NO: 989 - protein, 11 aa, synthetic construct
  REGION 1..11: note = Description of Artificial Sequence: Synthetic peptide
  REGION 1..11: note = 1A7[CD28]_H1L1 vlCDR1
RASQSISSYLN

SEQ ID NO: 990 - protein, 7 aa, synthetic construct
  REGION 1..7: note = Description of Artificial Sequence: Synthetic peptide
  REGION 1..7: note = 1A7[CD28]_H1L1 vlCDR2
AASSLQS

SEQ ID NO: 991 - protein, 9 aa, synthetic construct
  REGION 1..9: note = Description of Artificial Sequence: Synthetic peptide
  REGION 1..9: note = 1A7[CD28]_H1L1 vlCDR3
QQSYSTPFT

SEQ ID NO: 992 - protein, 450 aa, synthetic construct
  REGION 1..450: note = Description of Artificial Sequence: Synthetic polypeptide
  REGION 1..450: note = XENP28428 Heavy Chain
EVQLLESGGGLVQPGGSLRLSCAASGFTFSSYAMSWVRQAPGKGLEWVSTISGSGDSTYYADSVKGRFTISRDNSKNTLYLQMNSLRAEDTAVYYCAKSGPGLRQVGFDYWGQGTLVTVSSASTKGPSVFPLAPSSKSTSGGTAALGCLVKDYFPEPVTVSWNSGALTSGVHTFPAVLQSSGLYSLSSVVTVPSSSLGTQTYICNVNHKPSNTKVDKKVEPKSCDKTHTCPPCPAPPVAGPSVFLFPPKPKDTLMISRTPEVTCVVVDVKHEDPEVKFNWYVDGVEVHNAKTKPREEQYNSTYRVVSVLTVLHQDWLNGKEYKCKVSNKALPAPIEKTISKAKGQPREPQVYTLPPSREEMTKNQVSLTCLVKGFYPSDIAVEWESNGQPENNYKTTPPVLDSDGSFFLYSKLTVDKSRWQQGNVFSCSVMHEALHNHYTQKSLSLSPGK

SEQ ID NO: 993 - protein, 214 aa, synthetic construct
  REGION 1..214: note = Description of Artificial Sequence: Synthetic polypeptide
  REGION 1..214: note = XENP28428 Light Chain
DIQMTQSPSSLSASVGDRVTITCRASQSISSYLNWYQQKPGKAPKLLIYAASSLQSGVPSRFSGSGSGTDFTLTISSLQPEDFATYYCQQSYSTPFTFGQGTKLEIKRTVAAPSVFIFPPSDEQLKSGTASVVCLLNNFYPREAKVQWKVDNALQSGNSQESVTEQDSKDSTYSLSSTLTLSKADYEKHKVYACEVTHQGLSSPVTKSFNRGEC

SEQ ID NO: 994 - protein, 121 aa, synthetic construct; identical to SEQ ID NO: 561
  REGION 1..121: note = Description of Artificial Sequence: Synthetic polypeptide
  REGION 1..121: note = Variable heavy (vh) domain 1A7_H1.1

SEQ ID NO: 995 - protein, 5 aa, synthetic construct
  REGION 1..5: note = Description of Artificial Sequence: Synthetic peptide
  REGION 1..5: note = vhCDR1
SYYMS

SEQ ID NO: 996 - protein, 17 aa, synthetic construct
  REGION 1..17: note = Description of Artificial Sequence: Synthetic peptide
  REGION 1..17: note = vhCDR2
TISGSGDSTYYADSVKG

SEQ ID NO: 997 - protein, 12 aa, synthetic construct
  REGION 1..12: note = Description of Artificial Sequence: Synthetic peptide
  REGION 1..12: note = vhCDR3
SGPGLRQVGFDY

SEQ ID NO: 998 - protein, 121 aa, synthetic construct; identical to SEQ ID NO: 574
  REGION 1..121: note = Description of Artificial Sequence: Synthetic polypeptide
  REGION 1..121: note = Variable heavy (vh) domain 1A7_H1.14

SEQ ID NO: 999 - protein, 5 aa, synthetic construct
  REGION 1..5: note = Description of Artificial Sequence: Synthetic peptide
  REGION 1..5: note = vhCDR1
SYYMS

SEQ ID NO: 1000 - protein, 17 aa, synthetic construct
  REGION 1..17: note = Description of Artificial Sequence: Synthetic peptide
  REGION 1..17: note = vhCDR2
TISESGDSTYYADSVKG

SEQ ID NO: 1001 - protein, 12 aa, synthetic construct
  REGION 1..12: note = Description of Artificial Sequence: Synthetic peptide
  REGION 1..12: note = vhCDR3
SGPGLRQVGFDY

SEQ ID NO: 1002 - protein, 107 aa, synthetic construct; identical to SEQ ID NO: 700
  REGION 1..107: note = Description of Artificial Sequence: Synthetic polypeptide
  REGION 1..107: note = Variable light (vl) domain 1A7_L1.71

SEQ ID NO: 1003 - protein, 11 aa, synthetic construct
  REGION 1..11: note = Description of Artificial Sequence: Synthetic peptide
  REGION 1..11: note = vlCDR1
RASQSISSYLN

SEQ ID NO: 1004 - protein, 7 aa, synthetic construct
  REGION 1..7: note = Description of Artificial Sequence: Synthetic peptide
  REGION 1..7: note = vlCDR2
AASSLQS

SEQ ID NO: 1005 - protein, 9 aa, synthetic construct
  REGION 1..9: note = Description of Artificial Sequence: Synthetic peptide
  REGION 1..9: note = vlCDR3
QQVYSTPFT

SEQ ID NO: 1006 - protein, 121 aa, synthetic construct; identical to SEQ ID NO: 984
  REGION 1..121: note = Description of Artificial Sequence: Synthetic polypeptide
  REGION 1..121: note = 1A7[CD28]_H1_L1.71 Variable Heavy (vh) Domain

SEQ ID NO: 1007 - protein, 5 aa, synthetic construct
  REGION 1..5: note = Description of Artificial Sequence: Synthetic peptide
  REGION 1..5: note = 1A7[CD28]_H1_L1.71 vhCDR1
SYAMS

SEQ ID NO: 1008 - protein, 17 aa, synthetic construct
  REGION 1..17: note = Description of Artificial Sequence: Synthetic peptide
  REGION 1..17: note = 1A7[CD28]_H1_L1.71 vhCDR2
TISGSGDSTYYADSVKG

SEQ ID NO: 1009 - protein, 12 aa, synthetic construct
  REGION 1..12: note = Description of Artificial Sequence: Synthetic peptide
  REGION 1..12: note = 1A7[CD28]_H1_L1.71 vhCDR3
SGPGLRQVGFDY

SEQ ID NO: 1010 - protein, 107 aa, synthetic construct; identical to SEQ ID NO: 700
  REGION 1..107: note = Description of Artificial Sequence: Synthetic polypeptide
  REGION 1..107: note = 1A7[CD28]_H1_L1.71 Variable Light (vl) Domain

SEQ ID NO: 1011 - protein, 11 aa, synthetic construct
  REGION 1..11: note = Description of Artificial Sequence: Synthetic peptide
  REGION 1..11: note = 1A7[CD28]_H1_L1.71 vlCDR1
RASQSISSYLN

SEQ ID NO: 1012 - protein, 7 aa, synthetic construct
  REGION 1..7: note = Description of Artificial Sequence: Synthetic peptide
  REGION 1..7: note = 1A7[CD28]_H1_L1.71 vlCDR2
AASSLQS

SEQ ID NO: 1013 - protein, 9 aa, synthetic construct
  REGION 1..9: note = Description of Artificial Sequence: Synthetic peptide
  REGION 1..9: note = 1A7[CD28]_H1_L1.71 vlCDR3
QQVYSTPFT

SEQ ID NO: 1014 - protein, 121 aa, synthetic construct; identical to SEQ ID NO: 561
  REGION 1..121: note = Description of Artificial Sequence: Synthetic polypeptide
  REGION 1..121: note = 1A7[CD28]_H1.1_L1.71 Variable Heavy (vh) Domain

SEQ ID NO: 1015 - protein, 5 aa, synthetic construct
  REGION 1..5: note = Description of Artificial Sequence: Synthetic peptide
  REGION 1..5: note = 1A7[CD28]_H1.1_L1.71 vhCDR1
SYYMS

SEQ ID NO: 1016 - protein, 17 aa, synthetic construct
  REGION 1..17: note = Description of Artificial Sequence: Synthetic peptide
  REGION 1..17: note = 1A7[CD28]_H1.1_L1.71 vhCDR2
TISGSGDSTYYADSVKG

SEQ ID NO: 1017 - protein, 12 aa, synthetic construct
  REGION 1..12: note = Description of Artificial Sequence: Synthetic peptide
  REGION 1..12: note = 1A7[CD28]_H1.1_L1.71 vhCDR3
SGPGLRQVGFDY

SEQ ID NO: 1018 - protein, 107 aa, synthetic construct; identical to SEQ ID NO: 700
  REGION 1..107: note = Description of Artificial Sequence: Synthetic polypeptide
  REGION 1..107: note = 1A7[CD28]_H1.1_L1.71 Variable Light (vl) Domain

SEQ ID NO: 1019 - protein, 11 aa, synthetic construct
  REGION 1..11: note = Description of Artificial Sequence: Synthetic peptide
  REGION 1..11: note = 1A7[CD28]_H1.1_L1.71 vlCDR1
RASQSISSYLN

SEQ ID NO: 1020 - protein, 7 aa, synthetic construct
  REGION 1..7: note = Description of Artificial Sequence: Synthetic peptide
  REGION 1..7: note = 1A7[CD28]_H1.1_L1.71 vlCDR2
AASSLQS

SEQ ID NO: 1021 - protein, 9 aa, synthetic construct
  REGION 1..9: note = Description of Artificial Sequence: Synthetic peptide
  REGION 1..9: note = 1A7[CD28]_H1.1_L1.71 vlCDR3
QQVYSTPFT

SEQ ID NO: 1022 - protein, 121 aa, synthetic construct; identical to SEQ ID NO: 574
  REGION 1..121: note = Description of Artificial Sequence: Synthetic polypeptide
  REGION 1..121: note = 1A7[CD28]_H1.14_L1 Variable Heavy (vh) Domain

SEQ ID NO: 1023 - protein, 5 aa, synthetic construct
  REGION 1..5: note = Description of Artificial Sequence: Synthetic peptide
  REGION 1..5: note = 1A7[CD28]_H1.14_L1 vhCDR1
SYYMS

SEQ ID NO: 1024 - protein, 17 aa, synthetic construct
  REGION 1..17: note = Description of Artificial Sequence: Synthetic peptide
  REGION 1..17: note = 1A7[CD28]_H1.14_L1 vhCDR2
TISESGDSTYYADSVKG

SEQ ID NO: 1025 - protein, 12 aa, synthetic construct
  REGION 1..12: note = Description of Artificial Sequence: Synthetic peptide
  REGION 1..12: note = 1A7[CD28]_H1.14_L1 vhCDR3
SGPGLRQVGFDY

SEQ ID NO: 1026 - protein, 107 aa, synthetic construct; identical to SEQ ID NO: 988
  REGION 1..107: note = Description of Artificial Sequence: Synthetic polypeptide
  REGION 1..107: note = 1A7[CD28]_H1.14_L1 Variable Light (vl) Domain

SEQ ID NO: 1027 - protein, 11 aa, synthetic construct
  REGION 1..11: note = Description of Artificial Sequence: Synthetic peptide
  REGION 1..11: note = 1A7[CD28]_H1.14_L1 vlCDR1
RASQSISSYLN

SEQ ID NO: 1028 - protein, 7 aa, synthetic construct
  REGION 1..7: note = Description of Artificial Sequence: Synthetic peptide
  REGION 1..7: note = 1A7[CD28]_H1.14_L1 vlCDR2
AASSLQS

SEQ ID NO: 1029 - protein, 9 aa, synthetic construct
  REGION 1..9: note = Description of Artificial Sequence: Synthetic peptide
  REGION 1..9: note = 1A7[CD28]_H1.14_L1 vlCDR3
QQSYSTPFT

SEQ ID NO: 1030 - protein, 121 aa, synthetic construct; identical to SEQ ID NO: 574
  REGION 1..121: note = Description of Artificial Sequence: Synthetic polypeptide
  REGION 1..121: note = 1A7[CD28]_H1.14_L1.71 Variable Heavy (vh) Domain

SEQ ID NO: 1031 - protein, 5 aa, synthetic construct
  REGION 1..5: note = Description of Artificial Sequence: Synthetic peptide
  REGION 1..5: note = 1A7[CD28]_H1.14_L1.71 vhCDR1
SYYMS

SEQ ID NO: 1032 - protein, 17 aa, synthetic construct
  REGION 1..17: note = Description of Artificial Sequence: Synthetic peptide
  REGION 1..17: note = 1A7[CD28]_H1.14_L1.71 vhCDR2
TISESGDSTYYADSVKG

SEQ ID NO: 1033 - protein, 12 aa, synthetic construct
  REGION 1..12: note = Description of Artificial Sequence: Synthetic peptide
  REGION 1..12: note = 1A7[CD28]_H1.14_L1.71 vhCDR3
SGPGLRQVGFDY

SEQ ID NO: 1034 - protein, 107 aa, synthetic construct; identical to SEQ ID NO: 700
  REGION 1..107: note = Description of Artificial Sequence: Synthetic polypeptide
  REGION 1..107: note = 1A7[CD28]_H1.14_L1.71 Variable Light (vl) Domain

SEQ ID NO: 1035 - protein, 11 aa, synthetic construct
  REGION 1..11: note = Description of Artificial Sequence: Synthetic peptide
  REGION 1..11: note = 1A7[CD28]_H1.14_L1.71 vlCDR1
RASQSISSYLN

SEQ ID NO: 1036 - protein, 7 aa, synthetic construct
  REGION 1..7: note = Description of Artificial Sequence: Synthetic peptide
  REGION 1..7: note = 1A7[CD28]_H1.14_L1.71 vlCDR2
AASSLQS

SEQ ID NO: 1037 - protein, 9 aa, synthetic construct
  REGION 1..9: note = Description of Artificial Sequence: Synthetic peptide
  REGION 1..9: note = 1A7[CD28]_H1.14_L1.71 vlCDR3
QQVYSTPFT

SEQ ID NO: 1038 - protein, 450 aa, synthetic construct
  REGION 1..450: note = Description of Artificial Sequence: Synthetic polypeptide
  REGION 1..450: note = XENP27181 Heavy Chain
QVQLQESGPGLVKPSETLSLTCAVSGFSLTSYGVHWIRQPPGKGLEWLGVIWPGGGTNFNSALMSRLTISEDTSKNQVSLKLSSVTAADTAVYYCARDRAYGNYLYAMDYWGQGTLVTVSSASTKGPSVFPLAPSSKSTSGGTAALGCLVKDYFPEPVTVSWNSGALTSGVHTFPAVLQSSGLYSLSSVVTVPSSSLGTQTYICNVNHKPSNTKVDKKVEPKSCDKTHTCPPCPAPPVAGPSVFLFPPKPKDTLMISRTPEVTCVVVDVKHEDPEVKFNWYVDGVEVHNAKTKPREEQYNSTYRVVSVLTVLHQDWLNGKEYKCKVSNKALPAPIEKTISKAKGQPREPQVYTLPPSREEMTKNQVSLTCLVKGFYPSDIAVEWESNGQPENNYKTTPPVLDSDGSFFLYSKLTVDKSRWQQGNVFSCSVMHEALHNHYTQKSLSLSPGK

SEQ ID NO: 1039 - protein, 218 aa, synthetic construct
  REGION 1..218: note = Description of Artificial Sequence: Synthetic polypeptide
  REGION 1..218: note = XENP27181 Light Chain
DIQMTQSPSSLSASVGDRVTITCRASESVEYYVTSLMQWYQQKPGKAPKLLIYAASNVDSGVPSRFSGSGSGTDFTLTISSLQPEDIATYYCQQSRKVPFTFGGGTKVEIKRTVAAPSVFIFPPSDEQLKSGTASVVCLLNNFYPREAKVQWKVDNALQSGNSQESVTEQDSKDSTYSLSSTLTLSKADYEKHKVYACEVTHQGLSSPVTKSFNRGEC

SEQ ID NO: 1040 - protein, 231 aa, synthetic construct
  REGION 1..231: note = Description of Artificial Sequence: Synthetic polypeptide
  REGION 1..231: note = XENP27656 Chain 1 - empty-Fc(216)_IgG1_pI(-)_Isosteric_A_C220S/P VA_/S267K/L368D/K370S empty-Fc Heavy Chain
EPKSSDKTHTCPPCPAPPVAGPSVFLFPPKPKDTLMISRTPEVTCVVVDVKHEDPEVKFNWYVDGVEVHNAKTKPREEEYNSTYRVVSVLTVLHQDWLNGKEYKCKVSNKALPAPIEKTISKAKGQPREPQVYTLPPSREEMTKNQVSLTCDVSGFYPSDIAVEWESDGQPENNYKTTPPVLDSDGSFFLYSKLTVDKSRWEQGDVFSCSVMHEALHNHYTQKSLSLSPGK

SEQ ID NO: 1041 - protein, 483 aa, synthetic construct
  REGION 1..483: note = Description of Artificial Sequence: Synthetic polypeptide
  REGION 1..483: note = XENP27656 Chain 2 - HuTN228[CD28]_H1L1_scFv(GKPGS)4-Fc(216)_IgG1 _C220S/PVA_/S267K/S364K/E357Q scFv-Fc Heavy Chain
QVQLQESGPGLVKPSETLSLTCAVSGFSLTSYGVHWIRQPPGKGLEWLGVIWPGGGTNFNSALMSRLTISEDTSKNQVSLKLSSVTAADTAVYYCARDRAYGNYLYAMDYWGQGTLVTVSSGKPGSGKPGSGKPGSGKPGSDIQMTQSPSSLSASVGDRVTITCRASESVEYYVTSLMQWYQQKPGKAPKLLIYAASNVDSGVPSRFSGSGSGTDFTLTISSLQPEDIATYYCQQSRKVPFTFGGGTKVEIKEPKSSDKTHTCPPCPAPPVAGPSVFLFPPKPKDTLMISRTPEVTCVVVDVKHEDPEVKFNWYVDGVEVHNAKTKPREEQYNSTYRVVSVLTVLHQDWLNGKEYKCKVSNKALPAPIEKTISKAKGQPREPQVYTLPPSREQMTKNQVKLTCLVKGFYPSDIAVEWESNGQPENNYKTTPPVLDSDGSFFLYSKLTVDKSRWQQGNVFSCSVMHEALHNHYTQKSLSLSPGK

SEQ ID NO: 1042 - protein, 118 aa, synthetic construct
  REGION 1..118: note = Description of Artificial Sequence: Synthetic polypeptide
  REGION 1..118: note = 2G4[PDL1]_H1L1 Variable heavy (vh) domain
EVQLLESGGGLVQPGGSLRLSCAASGFTFSSYDMSWVRQAPGKRLEWVSTISSGGSFTHYPDSVKGRFTISRDNSKNTLYLQMNSLRAEDTAVYYCVRRSGDWYFDVWGAGTTVTVSS

SEQ ID NO: 1043 - protein, 5 aa, synthetic construct
  REGION 1..5: note = Description of Artificial Sequence: Synthetic peptide
  REGION 1..5: note = 2G4[PDL1]_H1L1 vhCDR1
SYDMS

SEQ ID NO: 1044 - protein, 17 aa, synthetic construct
  REGION 1..17: note = Description of Artificial Sequence: Synthetic peptide
  REGION 1..17: note = 2G4[PDL1]_H1L1 vhCDR2
TISSGGSFTHYPDSVKG

SEQ ID NO: 1045 - protein, 9 aa, synthetic construct
  REGION 1..9: note = Description of Artificial Sequence: Synthetic peptide
  REGION 1..9: note = 2G4[PDL1]_H1L1 vhCDR3
RSGDWYFDV

SEQ ID NO: 1046 - protein, 109 aa, synthetic construct
  REGION 1..109: note = Description of Artificial Sequence: Synthetic polypeptide
  REGION 1..109: note = 2G4[PDL1]_H1L1 Variable light (vl) domain
EIVLTQSPGTLSLSPGERATLSCRVSSSISSSNLHWYQQKPGQSPRPLIYGTSNLASGVPVRFSGSGSGTDYTLTISRLEPEDFAVYYCQQWSSYPLYTFGGGTKVEIK

SEQ ID NO: 1047 - protein, 12 aa, synthetic construct
  REGION 1..12: note = Description of Artificial Sequence: Synthetic peptide
  REGION 1..12: note = 2G4[PDL1]_H1L1 vlCDR1
RVSSSISSSNLH

SEQ ID NO: 1048 - protein, 7 aa, synthetic construct
  REGION 1..7: note = Description of Artificial Sequence: Synthetic peptide
  REGION 1..7: note = 2G4[PDL1]_H1L1 vlCDR2
GTSNLAS

SEQ ID NO: 1049 - protein, 10 aa, synthetic construct
  REGION 1..10: note = Description of Artificial Sequence: Synthetic peptide
  REGION 1..10: note = 2G4[PDL1]_H1L1 vlCDR3
QQWSSYPLYT

SEQ ID NO: 1050 - protein, 447 aa, synthetic construct
  REGION 1..447: note = Description of Artificial Sequence: Synthetic polypeptide
  REGION 1..447: note = XENP25859 Heavy Chain - 2G4[PD-L1]_H1 Heavy Chain
EVQLLESGGGLVQPGGSLRLSCAASGFTFSSYDMSWVRQAPGKRLEWVSTISSGGSFTHYPDSVKGRFTISRDNSKNTLYLQMNSLRAEDTAVYYCVRRSGDWYFDVWGAGTTVTVSSASTKGPSVFPLAPSSKSTSGGTAALGCLVKDYFPEPVTVSWNSGALTSGVHTFPAVLQSSGLYSLSSVVTVPSSSLGTQTYICNVNHKPSNTKVDKKVEPKSCDKTHTCPPCPAPPVAGPSVFLFPPKPKDTLMISRTPEVTCVVVDVKHEDPEVKFNWYVDGVEVHNAKTKPREEQYNSTYRVVSVLTVLHQDWLNGKEYKCKVSNKALPAPIEKTISKAKGQPREPQVYTLPPSREEMTKNQVSLTCLVKGFYPSDIAVEWESNGQPENNYKTTPPVLDSDGSFFLYSKLTVDKSRWQQGNVFSCSVMHEALHNHYTQKSLSLSPGK

SEQ ID NO: 1051 - protein, 216 aa, synthetic construct
  REGION 1..216: note = Description of Artificial Sequence: Synthetic polypeptide
  REGION 1..216: note = XENP25859 Light Chain - 2G4[PD-L1]_L1 Light Chain
EIVLTQSPGTLSLSPGERATLSCRVSSSISSSNLHWYQQKPGQSPRPLIYGTSNLASGVPVRFSGSGSGTDYTLTISRLEPEDFAVYYCQQWSSYPLYTFGGGTKVEIKRTVAAPSVFIFPPSDEQLKSGTASVVCLLNNFYPREAKVQWKVDNALQSGNSQESVTEQDSKDSTYSLSSTLTLSKADYEKHKVYACEVTHQGLSSPVTKSFNRGEC

SEQ ID NO: 1052 - protein, 447 aa, synthetic construct
  REGION 1..447: note = Description of Artificial Sequence: Synthetic polypeptide
  REGION 1..447: note = XENP36627 Chain 1 - 2G4[PD-L1]_H1_IgG1_pI(-)_Isosteric_A_PVA_/S 267K/L368D/K370S
EVQLLESGGGLVQPGGSLRLSCAASGFTFSSYDMSWVRQAPGKRLEWVSTISSGGSFTHYPDSVKGRFTISRDNSKNTLYLQMNSLRAEDTAVYYCVRRSGDWYFDVWGAGTTVTVSSASTKGPSVFPLAPSSKSTSGGTAALGCLVKDYFPEPVTVSWNSGALTSGVHTFPAVLQSSGLYSLSSVVTVPSSSLGTQTYICNVNHKPSDTKVDKKVEPKSCDKTHTCPPCPAPPVAGPSVFLFPPKPKDTLMISRTPEVTCVVVDVKHEDPEVKFNWYVDGVEVHNAKTKPREEEYNSTYRVVSVLTVLHQDWLNGKEYKCKVSNKALPAPIEKTISKAKGQPREPQVYTLPPSREEMTKNQVSLTCDVSGFYPSDIAVEWESDGQPENNYKTTPPVLDSDGSFFLYSKLTVDKSRWEQGDVFSCSVMHEALHNHYTQKSLSLSPGK

SEQ ID NO: 1053 - protein, 231 aa, synthetic construct
  REGION 1..231: note = Description of Artificial Sequence: Synthetic polypeptide
  REGION 1..231: note = XENP36627 Chain 2 - empty-Fc(216)_IgG1_ISO(+RR)_C220S/PVA_/S267 K/S364K/E357Q
ERKSSDKTHTCPRCPAPPVAGPSVFLFPPKPKDTLMISRTPEVTCVVVDVKHEDPEVKFKWYVDGVEVHNAKTKPREEQYNSTYRVVSVLTVLHQDWLNGKEYKCKVSNKALPAPIEKTISKAKGQPREPQVYTLPPSREQMTKNQVKLTCLVKGFYPSDIAVEWESNGQPENNYKTTPPVLDSDGSFFLYSKLTVDKSRWQQGNVFSCSVMHEALHNHYTQKSLSLSPGK

SEQ ID NO: 1054 - protein, 216 aa, synthetic construct; identical to SEQ ID NO: 1051
  REGION 1..216: note = Description of Artificial Sequence: Synthetic polypeptide
  REGION 1..216: note = XENP36627 Chain 3 - 2G4[PD-L1]_L1

SEQ ID NO: 1055 - protein, 118 aa, synthetic construct; identical to SEQ ID NO: 736
  REGION 1..118: note = Description of Artificial Sequence: Synthetic polypeptide
  REGION 1..118: note = Variable heavy (vh) domain 2G4_H1.1

SEQ ID NO: 1056 - protein, 5 aa, synthetic construct
  REGION 1..5: note = Description of Artificial Sequence: Synthetic peptide
  REGION 1..5: note = vhCDR1
SRDMS

SEQ ID NO: 1057 - protein, 17 aa, synthetic construct
  REGION 1..17: note = Description of Artificial Sequence: Synthetic peptide
  REGION 1..17: note = vhCDR2
TISSGGSFTHYPDSVKG

SEQ ID NO: 1058 - protein, 9 aa, synthetic construct
  REGION 1..9: note = Description of Artificial Sequence: Synthetic peptide
  REGION 1..9: note = vhCDR3
RSGDWYFDV

SEQ ID NO: 1059 - protein, 118 aa, synthetic construct; identical to SEQ ID NO: 739
  REGION 1..118: note = Description of Artificial Sequence: Synthetic polypeptide
  REGION 1..118: note = Variable heavy (vh) domain 2G4_H1.4

SEQ ID NO: 1060 - protein, 5 aa, synthetic construct
  REGION 1..5: note = Description of Artificial Sequence: Synthetic peptide
  REGION 1..5: note = vhCDR1
SYDMS

SEQ ID NO: 1061 - protein, 17 aa, synthetic construct
  REGION 1..17: note = Description of Artificial Sequence: Synthetic peptide
  REGION 1..17: note = vhCDR2
TISSGGSFTHYPDSVKG

SEQ ID NO: 1062 - protein, 9 aa, synthetic construct
  REGION 1..9: note = Description of Artificial Sequence: Synthetic peptide
  REGION 1..9: note = vhCDR3
RSLDWYFDV

SEQ ID NO: 1063 - protein, 118 aa, synthetic construct; identical to SEQ ID NO: 741
  REGION 1..118: note = Description of Artificial Sequence: Synthetic polypeptide
  REGION 1..118: note = Variable heavy (vh) domain 2G4_H1.6

SEQ ID NO: 1064 - protein, 5 aa, synthetic construct
  REGION 1..5: note = Description of Artificial Sequence: Synthetic peptide
  REGION 1..5: note = vhCDR1
SRDMS

SEQ ID NO: 1065 - protein, 17 aa, synthetic construct
  REGION 1..17: note = Description of Artificial Sequence: Synthetic peptide
  REGION 1..17: note = vhCDR2
TISSGGRFTHYPDSVKG

SEQ ID NO: 1066 - protein, 9 aa, synthetic construct
  REGION 1..9: note = Description of Artificial Sequence: Synthetic peptide
  REGION 1..9: note = vhCDR3
RSGDWYFDV

SEQ ID NO: 1067 - protein, 118 aa, synthetic construct; identical to SEQ ID NO: 743
  REGION 1..118: note = Description of Artificial Sequence: Synthetic polypeptide
  REGION 1..118: note = Variable heavy (vh) domain 2G4_H1.8

SEQ ID NO: 1068 - protein, 5 aa, synthetic construct
  REGION 1..5: note = Description of Artificial Sequence: Synthetic peptide
  REGION 1..5: note = vhCDR1
SSDMS

SEQ ID NO: 1069 - protein, 17 aa, synthetic construct
  REGION 1..17: note = Description of Artificial Sequence: Synthetic peptide
  REGION 1..17: note = vhCDR2
TISSGGSFTHYPDSVKG

SEQ ID NO: 1070 - protein, 9 aa, synthetic construct
  REGION 1..9: note = Description of Artificial Sequence: Synthetic peptide
  REGION 1..9: note = vhCDR3
RSGDWYFDV

SEQ ID NO: 1071 - protein, 118 aa, synthetic construct; identical to SEQ ID NO: 744
  REGION 1..118: note = Description of Artificial Sequence: Synthetic polypeptide
  REGION 1..118: note = Variable heavy (vh) domain 2G4_H1.9

SEQ ID NO: 1072 - protein, 5 aa, synthetic construct
  REGION 1..5: note = Description of Artificial Sequence: Synthetic peptide
  REGION 1..5: note = vhCDR1
FRDMS

SEQ ID NO: 1073 - protein, 17 aa, synthetic construct
  REGION 1..17: note = Description of Artificial Sequence: Synthetic peptide
  REGION 1..17: note = vhCDR2
TISSGGSFTHYPDSVKG

SEQ ID NO: 1074 - protein, 9 aa, synthetic construct
  REGION 1..9: note = Description of Artificial Sequence: Synthetic peptide
  REGION 1..9: note = vhCDR3
RSGDWYFDV

SEQ ID NO: 1075 - protein, 118 aa, synthetic construct; identical to SEQ ID NO: 745
  REGION 1..118: note = Description of Artificial Sequence: Synthetic polypeptide
  REGION 1..118: note = Variable heavy (vh) domain 2G4_H1.10

SEQ ID NO: 1076 - protein, 5 aa, synthetic construct
  REGION 1..5: note = Description of Artificial Sequence: Synthetic peptide
  REGION 1..5: note = vhCDR1
WYDMS

SEQ ID NO: 1077 - protein, 17 aa, synthetic construct
  REGION 1..17: note = Description of Artificial Sequence: Synthetic peptide
  REGION 1..17: note = vhCDR2
TISSGGSFTHYPDSVKG

SEQ ID NO: 1078 - protein, 9 aa, synthetic construct
  REGION 1..9: note = Description of Artificial Sequence: Synthetic peptide
  REGION 1..9: note = vhCDR3
RSGDWYFDV

SEQ ID NO: 1079 - protein, 118 aa, synthetic construct; identical to SEQ ID NO: 747
  REGION 1..118: note = Description of Artificial Sequence: Synthetic polypeptide
  REGION 1..118: note = Variable heavy (vh) domain 2G4_H1.12

SEQ ID NO: 1080 - protein, 5 aa, synthetic construct
  REGION 1..5: note = Description of Artificial Sequence: Synthetic peptide
  REGION 1..5: note = vhCDR1
VYDMS

SEQ ID NO: 1081 - protein, 17 aa, synthetic construct
  REGION 1..17: note = Description of Artificial Sequence: Synthetic peptide
  REGION 1..17: note = vhCDR2
TISSGGSFTHYPDSVKG

SEQ ID NO: 1082 - protein, 9 aa, synthetic construct
  REGION 1..9: note = Description of Artificial Sequence: Synthetic peptide
  REGION 1..9: note = vhCDR3
RSLDWYFDV

SEQ ID NO: 1083 - protein, 118 aa, synthetic construct; identical to SEQ ID NO: 749
  REGION 1..118: note = Description of Artificial Sequence: Synthetic polypeptide
  REGION 1..118: note = Variable heavy (vh) domain 2G4_H1.14

SEQ ID NO: 1084 - protein, 5 aa, synthetic construct
  REGION 1..5: note = Description of Artificial Sequence: Synthetic peptide
  REGION 1..5: note = vhCDR1
SSDMS

SEQ ID NO: 1085 - protein, 17 aa, synthetic construct
  REGION 1..17: note = Description of Artificial Sequence: Synthetic peptide
  REGION 1..17: note = vhCDR2
TISSGGSFTHYPDSVKG

SEQ ID NO: 1086 - protein, 9 aa, synthetic construct
  REGION 1..9: note = Description of Artificial Sequence: Synthetic peptide
  REGION 1..9: note = vhCDR3
RSLDWYFDV

SEQ ID NO: 1087 - protein, 118 aa, synthetic construct; identical to SEQ ID NO: 794
  REGION 1..118: note = Description of Artificial Sequence: Synthetic polypeptide
  REGION 1..118: note = Variable heavy (vh) domain 2G4_H1.59

SEQ ID NO: 1088 - protein, 5 aa, synthetic construct
  REGION 1..5: note = Description of Artificial Sequence: Synthetic peptide
  REGION 1..5: note = vhCDR1
SRDMS

SEQ ID NO: 1089 - protein, 17 aa, synthetic construct
  REGION 1..17: note = Description of Artificial Sequence: Synthetic peptide
  REGION 1..17: note = vhCDR2
TISSGGRFTHYPDSVKG

SEQ ID NO: 1090 - protein, 9 aa, synthetic construct
  REGION 1..9: note = Description of Artificial Sequence: Synthetic peptide
  REGION 1..9: note = vhCDR3
RSGDWYFDV

SEQ ID NO: 1091 - protein, 118 aa, synthetic construct; identical to SEQ ID NO: 795
  REGION 1..118: note = Description of Artificial Sequence: Synthetic polypeptide
  REGION 1..118: note = Variable heavy (vh) domain 2G4_H1.60

SEQ ID NO: 1092 - protein, 5 aa, synthetic construct
  REGION 1..5: note = Description of Artificial Sequence: Synthetic peptide
  REGION 1..5: note = vhCDR1
SSDMS

SEQ ID NO: 1093 - protein, 17 aa, synthetic construct
  REGION 1..17: note = Description of Artificial Sequence: Synthetic peptide
  REGION 1..17: note = vhCDR2
TISSGGSFTHYPDSVKG

SEQ ID NO: 1094 - protein, 9 aa, synthetic construct
  REGION 1..9: note = Description of Artificial Sequence: Synthetic peptide
  REGION 1..9: note = vhCDR3
RSLDWYFDV

SEQ ID NO: 1095 - protein, 118 aa, synthetic construct; identical to SEQ ID NO: 796
  REGION 1..118: note = Description of Artificial Sequence: Synthetic polypeptide
  REGION 1..118: note = Variable heavy (vh) domain 2G4_H1.61

SEQ ID NO: 1096 - protein, 5 aa, synthetic construct
  REGION 1..5: note = Description of Artificial Sequence: Synthetic peptide
  REGION 1..5: note = vhCDR1
SYDMS

SEQ ID NO: 1097 - protein, 17 aa, synthetic construct
  REGION 1..17: note = Description of Artificial Sequence: Synthetic peptide
  REGION 1..17: note = vhCDR2
TISSGGSFTHYPDSVKG

SEQ ID NO: 1098 - protein, 9 aa, synthetic construct
  REGION 1..9: note = Description of Artificial Sequence: Synthetic peptide
  REGION 1..9: note = vhCDR3
RSLDWYFDV

SEQ ID NO: 1099 - protein, 118 aa, synthetic construct; identical to SEQ ID NO: 797
  REGION 1..118: note = Description of Artificial Sequence: Synthetic polypeptide
  REGION 1..118: note = Variable heavy (vh) domain 2G4_H1.62

SEQ ID NO: 1100 - protein, 5 aa, synthetic construct
  REGION 1..5: note = Description of Artificial Sequence: Synthetic peptide
  REGION 1..5: note = vhCDR1
SYDMS

SEQ ID NO: 1101 - protein, 17 aa, synthetic construct
  REGION 1..17: note = Description of Artificial Sequence: Synthetic peptide
  REGION 1..17: note = vhCDR2
TISSGGSFTHYPDSVKG

SEQ ID NO: 1102 - protein, 9 aa, synthetic construct
  REGION 1..9: note = Description of Artificial Sequence: Synthetic peptide
  REGION 1..9: note = vhCDR3
RSGDWYFDV

SEQ ID NO: 1103 - protein, 109 aa, synthetic construct; identical to SEQ ID NO: 798
  REGION 1..109: note = Description of Artificial Sequence: Synthetic polypeptide
  REGION 1..109: note = Variable heavy (vh) domain 2G4_L1.1

SEQ ID NO: 1104 - protein, 12 aa, synthetic construct
  REGION 1..12: note = Description of Artificial Sequence: Synthetic peptide
  REGION 1..12: note = vlCDR1
RVSSSISSSNLH

SEQ ID NO: 1105 - protein, 7 aa, synthetic construct
  REGION 1..7: note = Description of Artificial Sequence: Synthetic peptide
  REGION 1..7: note = vlCDR2
GTSNLAS

SEQ ID NO: 1106 - protein, 10 aa, synthetic construct
  REGION 1..10: note = Description of Artificial Sequence: Synthetic peptide
  REGION 1..10: note = vlCDR3
QQWWSYPLYT

SEQ ID NO: 1107 - protein, 109 aa, synthetic construct; identical to SEQ ID NO: 800
  REGION 1..109: note = Description of Artificial Sequence: Synthetic polypeptide
  REGION 1..109: note = Variable heavy (vh) domain 2G4_L1.3

SEQ ID NO: 1108 - protein, 12 aa, synthetic construct
  REGION 1..12: note = Description of Artificial Sequence: Synthetic peptide
  REGION 1..12: note = vlCDR1
RVSSSISSSNLH

SEQ ID NO: 1109 - protein, 7 aa, synthetic construct
  REGION 1..7: note = Description of Artificial Sequence: Synthetic peptide
  REGION 1..7: note = vlCDR2
GTSNLAS

SEQ ID NO: 1110 - protein, 10 aa, synthetic construct
  REGION 1..10: note = Description of Artificial Sequence: Synthetic peptide
  REGION 1..10: note = vlCDR3
QQWSSYPLWT

SEQ ID NO: 1111 - protein, 109 aa, synthetic construct; identical to SEQ ID NO: 811
  REGION 1..109: note = Description of Artificial Sequence: Synthetic polypeptide
  REGION 1..109: note = Variable heavy (vh) domain 2G4_L1.14

SEQ ID NO: 1112 - protein, 12 aa, synthetic construct
  REGION 1..12: note = Description of Artificial Sequence: Synthetic peptide
  REGION 1..12: note = vlCDR1
RVSSSIQSSNLH

SEQ ID NO: 1113 - protein, 7 aa, synthetic construct
  REGION 1..7: note = Description of Artificial Sequence: Synthetic peptide
  REGION 1..7: note = vlCDR2
GTSNLAS

SEQ ID NO: 1114 - protein, 10 aa, synthetic construct
  REGION 1..10: note = Description of Artificial Sequence: Synthetic peptide
  REGION 1..10: note = vlCDR3
QQWSSYPLYT

SEQ ID NO: 1115 - protein, 109 aa, synthetic construct; identical to SEQ ID NO: 820
  REGION 1..109: note = Description of Artificial Sequence: Synthetic polypeptide
  REGION 1..109: note = Variable light (vl) domain 2G4_L1.23

SEQ ID NO: 1116 - protein, 12 aa, synthetic construct
  REGION 1..12: note = Description of Artificial Sequence: Synthetic peptide
  REGION 1..12: note = vlCDR1
RVSLSIQSSNLH

SEQ ID NO: 1117 - protein, 7 aa, synthetic construct
  REGION 1..7: note = Description of Artificial Sequence: Synthetic peptide
  REGION 1..7: note = vlCDR2
GTNLLAS

SEQ ID NO: 1118 - protein, 10 aa, synthetic construct
  REGION 1..10: note = Description of Artificial Sequence: Synthetic peptide
  REGION 1..10: note = vlCDR3
QQWSSYPLYT

SEQ ID NO: 1119 - protein, 109 aa, synthetic construct; identical to SEQ ID NO: 821
  REGION 1..109: note = Description of Artificial Sequence: Synthetic polypeptide
  REGION 1..109: note = Variable light (vl) domain 2G4_L1.24

SEQ ID NO: 1120 - protein, 12 aa, synthetic construct
  REGION 1..12: note = Description of Artificial Sequence: Synthetic peptide
  REGION 1..12: note = vlCDR1
RVSSSIQSTNLH

SEQ ID NO: 1121 - protein, 7 aa, synthetic construct
  REGION 1..7: note = Description of Artificial Sequence: Synthetic peptide
  REGION 1..7: note = vlCDR2
GTSVLAT

SEQ ID NO: 1122 - protein, 10 aa, synthetic construct
  REGION 1..10: note = Description of Artificial Sequence: Synthetic peptide
  REGION 1..10: note = vlCDR3
QQWSSYPLYT

SEQ ID NO: 1123 - protein, 109 aa, synthetic construct; identical to SEQ ID NO: 822
  REGION 1..109: note = Description of Artificial Sequence: Synthetic polypeptide
  REGION 1..109: note = Variable heavy (vh) domain 2G4_L1.25

SEQ ID NO: 1124 - protein, 12 aa, synthetic construct
  REGION 1..12: note = Description of Artificial Sequence: Synthetic peptide
  REGION 1..12: note = vlCDR1
RVSSSIQPSNLH

SEQ ID NO: 1125 - protein, 7 aa, synthetic construct
  REGION 1..7: note = Description of Artificial Sequence: Synthetic peptide
  REGION 1..7: note = vlCDR2
GTSNLAS

SEQ ID NO: 1126 - protein, 10 aa, synthetic construct
  REGION 1..10: note = Description of Artificial Sequence: Synthetic peptide
  REGION 1..10: note = vlCDR3
QQWSSYPLYT

SEQ ID NO: 1127 - protein, 109 aa, synthetic construct; identical to SEQ ID NO: 823
  REGION 1..109: note = Description of Artificial Sequence: Synthetic polypeptide
  REGION 1..109: note = Variable heavy (vh) domain 2G4_L1.26

SEQ ID NO: 1128 - protein, 12 aa, synthetic construct
  REGION 1..12: note = Description of Artificial Sequence: Synthetic peptide
  REGION 1..12: note = vlCDR1
RASSSIQDSNLH

SEQ ID NO: 1129 - protein, 7 aa, synthetic construct
  REGION 1..7: note = Description of Artificial Sequence: Synthetic peptide
  REGION 1..7: note = vlCDR2
GTSNLRS

SEQ ID NO: 1130 - protein, 10 aa, synthetic construct
  REGION 1..10: note = Description of Artificial Sequence: Synthetic peptide
  REGION 1..10: note = vlCDR3
QQWSSYPLYT

SEQ ID NO: 1131 - protein, 109 aa, synthetic construct; identical to SEQ ID NO: 824
  REGION 1..109: note = Description of Artificial Sequence: Synthetic polypeptide
  REGION 1..109: note = Variable heavy (vh) domain 2G4_L1.27

SEQ ID NO: 1132 - protein, 12 aa, synthetic construct
  REGION 1..12: note = Description of Artificial Sequence: Synthetic peptide
  REGION 1..12: note = vlCDR1
RVSSSIQGSNLH

SEQ ID NO: 1133 - protein, 7 aa, synthetic construct
  REGION 1..7: note = Description of Artificial Sequence: Synthetic peptide
  REGION 1..7: note = vlCDR2
GTSNLAS

SEQ ID NO: 1134 - protein, 10 aa, synthetic construct
  REGION 1..10: note = Description of Artificial Sequence: Synthetic peptide
  REGION 1..10: note = vlCDR3
QQWSSYPLYT

SEQ ID NO: 1135 - protein, 109 aa, synthetic construct; identical to SEQ ID NO: 826
  REGION 1..109: note = Description of Artificial Sequence: Synthetic polypeptide
  REGION 1..109: note = Variable heavy (vh) domain 2G4_L1.29

SEQ ID NO: 1136 - protein, 12 aa, synthetic construct
  REGION 1..12: note = Description of Artificial Sequence: Synthetic peptide
  REGION 1..12: note = vlCDR1
RVSSRIVLSNLH

SEQ ID NO: 1137 - protein, 7 aa, synthetic construct
  REGION 1..7: note = Description of Artificial Sequence: Synthetic peptide
  REGION 1..7: note = vlCDR2
GTSVLAT

SEQ ID NO: 1138 - protein, 10 aa, synthetic construct
  REGION 1..10: note = Description of Artificial Sequence: Synthetic peptide
  REGION 1..10: note = vlCDR3
QQWSSYPLWT

SEQ ID NO: 1139 - protein, 109 aa, synthetic construct; identical to SEQ ID NO: 857
  REGION 1..109: note = Description of Artificial Sequence: Synthetic polypeptide
  REGION 1..109: note = Variable heavy (vh) domain 2G4_L1.60

SEQ ID NO: 1140 - protein, 12 aa, synthetic construct
  REGION 1..12: note = Description of Artificial Sequence: Synthetic peptide
  REGION 1..12: note = vlCDR1
RASSSISSSNLH

SEQ ID NO: 1141 - protein, 7 aa, synthetic construct
  REGION 1..7: note = Description of Artificial Sequence: Synthetic peptide
  REGION 1..7: note = vlCDR2
GTSNLAS

SEQ ID NO: 1142 - protein, 10 aa, synthetic construct
  REGION 1..10: note = Description of Artificial Sequence: Synthetic peptide
  REGION 1..10: note = vlCDR3
QQWSSYPLWT

SEQ ID NO: 1143 - protein, 109 aa, synthetic construct; identical to SEQ ID NO: 858
  REGION 1..109: note = Description of Artificial Sequence: Synthetic polypeptide
  REGION 1..109: note = Variable heavy (vh) domain 2G4_L1.61

SEQ ID NO: 1144 - protein, 12 aa, synthetic construct
  REGION 1..12: note = Description of Artificial Sequence: Synthetic peptide
  REGION 1..12: note = vlCDR1
RASLSIQSSNLH

SEQ ID NO: 1145 - protein, 7 aa, synthetic construct
  REGION 1..7: note = Description of Artificial Sequence: Synthetic peptide
  REGION 1..7: note = vlCDR2
GTNLLAS

SEQ ID NO: 1146 - protein, 10 aa, synthetic construct
  REGION 1..10: note = Description of Artificial Sequence: Synthetic peptide
  REGION 1..10: note = vlCDR3
QQWSSYPLYT

SEQ ID NO: 1147 - protein, 109 aa, synthetic construct; identical to SEQ ID NO: 860
  REGION 1..109: note = Description of Artificial Sequence: Synthetic polypeptide
  REGION 1..109: note = Variable heavy (vh) domain 2G4_L1.63

SEQ ID NO: 1148 - protein, 12 aa, synthetic construct
  REGION 1..12: note = Description of Artificial Sequence: Synthetic peptide
  REGION 1..12: note = vlCDR1
RASSSISSSNLH

SEQ ID NO: 1149 - protein, 7 aa, synthetic construct
  REGION 1..7: note = Description of Artificial Sequence: Synthetic peptide
  REGION 1..7: note = vlCDR2
GTSNLAS

SEQ ID NO: 1150 - protein, 10 aa, synthetic construct
  REGION 1..10: note = Description of Artificial Sequence: Synthetic peptide
  REGION 1..10: note = vlCDR3
QQWSSYPLYT

SEQ ID NO: 1151 - protein, 109 aa, synthetic construct; identical to SEQ ID NO: 863
  REGION 1..109: note = Description of Artificial Sequence: Synthetic polypeptide
  REGION 1..109: note = Variable heavy (vh) domain 2G4_L1.66

SEQ ID NO: 1152 - protein, 12 aa, synthetic construct
  REGION 1..12: note = Description of Artificial Sequence: Synthetic peptide
  REGION 1..12: note = vlCDR1
RVSSSIQSTNLH

SEQ ID NO: 1153 - protein, 7 aa, synthetic construct
  REGION 1..7: note = Description of Artificial Sequence: Synthetic peptide
  REGION 1..7: note = vlCDR2
GTSNLAT

SEQ ID NO: 1154 - protein, 10 aa, synthetic construct
  REGION 1..10: note = Description of Artificial Sequence: Synthetic peptide
  REGION 1..10: note = vlCDR3
QQWSSYPLYT

SEQ ID NO: 1155 - protein, 109 aa, synthetic construct; identical to SEQ ID NO: 865
  REGION 1..109: note = Description of Artificial Sequence: Synthetic polypeptide
  REGION 1..109: note = Variable heavy (vh) domain 2G4_L1.68

SEQ ID NO: 1156 - protein, 12 aa, synthetic construct
  REGION 1..12: note = Description of Artificial Sequence: Synthetic peptide
  REGION 1..12: note = vlCDR1
RVSSSIQSTNLH

SEQ ID NO: 1157 - protein, 7 aa, synthetic construct
  REGION 1..7: note = Description of Artificial Sequence: Synthetic peptide
  REGION 1..7: note = vlCDR2
GTSNLAS

SEQ ID NO: 1158 - protein, 10 aa, synthetic construct
  REGION 1..10: note = Description of Artificial Sequence: Synthetic peptide
  REGION 1..10: note = vlCDR3
QQWSSYPLYT

SEQ ID NO: 1159 - protein, 118 aa, synthetic construct; identical to SEQ ID NO: 747
  REGION 1..118: note = Description of Artificial Sequence: Synthetic polypeptide
  REGION 1..118: note = 2G4[CD28]_H1.12_L1.24 Variable Heavy (vh) Domain

SEQ ID NO: 1160 - protein, 5 aa, synthetic construct
  REGION 1..5: note = Description of Artificial Sequence: Synthetic peptide
  REGION 1..5: note = 2G4[CD28]_H1.12_L1.24 vhCDR1
VYDMS

SEQ ID NO: 1161 - protein, 17 aa, synthetic construct
  REGION 1..17: note = Description of Artificial Sequence: Synthetic peptide
  REGION 1..17: note = 2G4[CD28]_H1.12_L1.24 vhCDR2
TISSGGSFTHYPDSVKG

SEQ ID NO: 1162 - protein, 9 aa, synthetic construct
  REGION 1..9: note = Description of Artificial Sequence: Synthetic peptide
  REGION 1..9: note = 2G4[CD28]_H1.12_L1.24 vhCDR3
RSLDWYFDV

SEQ ID NO: 1163 - protein, 109 aa, synthetic construct; identical to SEQ ID NO: 821
  REGION 1..109: note = Description of Artificial Sequence: Synthetic polypeptide
  REGION 1..109: note = 2G4[CD28]_H1.12_L1.24 Variable Light (vl) Domain

SEQ ID NO: 1164 - protein, 12 aa, synthetic construct
  REGION 1..12: note = Description of Artificial Sequence: Synthetic peptide
  REGION 1..12: note = 2G4[CD28]_H1.12_L1.24 vlCDR1
RVSSSIQSTNLH

SEQ ID NO: 1165 - protein, 7 aa, synthetic construct
  REGION 1..7: note = Description of Artificial Sequence: Synthetic peptide
  REGION 1..7: note = 2G4[CD28]_H1.12_L1.24 vlCDR2
GTSVLAT

SEQ ID NO: 1166 - protein, 10 aa, synthetic construct
  REGION 1..10: note = Description of Artificial Sequence: Synthetic peptide
  REGION 1..10: note = 2G4[CD28]_H1.12_L1.24 vlCDR3
QQWSSYPLYT

SEQ ID NO: 1167 - protein, 118 aa, synthetic construct; identical to SEQ ID NO: 747
  REGION 1..118: note = Description of Artificial Sequence: Synthetic polypeptide
  REGION 1..118: note = 2G4[CD28]_H1.12_L1.66 Variable Heavy (vh) Domain

SEQ ID NO: 1168 - protein, 5 aa, synthetic construct
  REGION 1..5: note = Description of Artificial Sequence: Synthetic peptide
  REGION 1..5: note = 2G4[CD28]_H1.12_L1.66 vhCDR1
VYDMS

SEQ ID NO: 1169 - protein, 17 aa, synthetic construct
  REGION 1..17: note = Description of Artificial Sequence: Synthetic peptide
  REGION 1..17: note = 2G4[CD28]_H1.12_L1.66 vhCDR2
TISSGGSFTHYPDSVKG

SEQ ID NO: 1170 - protein, 9 aa, synthetic construct
  REGION 1..9: note = Description of Artificial Sequence: Synthetic peptide
  REGION 1..9: note = 2G4[CD28]_H1.12_L1.66 vhCDR3
RSLDWYFDV

SEQ ID NO: 1171 - protein, 109 aa, synthetic construct; identical to SEQ ID NO: 863
  REGION 1..109: note = Description of Artificial Sequence: Synthetic polypeptide
  REGION 1..109: note = 2G4[CD28]_H1.12_L1.66 Variable Light (vl) Domain

SEQ ID NO: 1172 - protein, 12 aa, synthetic construct
  REGION 1..12: note = Description of Artificial Sequence: Synthetic peptide
  REGION 1..12: note = 2G4[CD28]_H1.12_L1.66 vlCDR1
RVSSSIQSTNLH

SEQ ID NO: 1173 - protein, 7 aa, synthetic construct
  REGION 1..7: note = Description of Artificial Sequence: Synthetic peptide
  REGION 1..7: note = 2G4[CD28]_H1.12_L1.66 vlCDR2
GTSNLAT

SEQ ID NO: 1174 - protein, 10 aa, synthetic construct
  REGION 1..10: note = Description of Artificial Sequence: Synthetic peptide
  REGION 1..10: note = 2G4[CD28]_H1.12_L1.66 vlCDR3
QQWSSYPLYT

SEQ ID NO: 1175 - protein, 118 aa, synthetic construct; identical to SEQ ID NO: 747
  REGION 1..118: note = Description of Artificial Sequence: Synthetic polypeptide
  REGION 1..118: note = 2G4[CD28]_H1.12_L1.68 Variable Heavy (vh) Domain

SEQ ID NO: 1176 - protein, 5 aa, synthetic construct
  REGION 1..5: note = Description of Artificial Sequence: Synthetic peptide
  REGION 1..5: note = 2G4[CD28]_H1.12_L1.68 vhCDR1
VYDMS

SEQ ID NO: 1177 - protein, 17 aa, synthetic construct
  REGION 1..17: note = Description of Artificial Sequence: Synthetic peptide
  REGION 1..17: note = 2G4[CD28]_H1.12_L1.68 vhCDR2
TISSGGSFTHYPDSVKG

SEQ ID NO: 1178 - protein, 9 aa, synthetic construct
  REGION 1..9: note = Description of Artificial Sequence: Synthetic peptide
  REGION 1..9: note = 2G4[CD28]_H1.12_L1.68 vhCDR3
RSLDWYFDV

SEQ ID NO: 1179 - protein, 109 aa, synthetic construct; identical to SEQ ID NO: 865
  REGION 1..109: note = Description of Artificial Sequence: Synthetic polypeptide
  REGION 1..109: note = 2G4[CD28]_H1.12_L1.68 Variable Light (vl) Domain

SEQ ID NO: 1180 - protein, 12 aa, synthetic construct
  REGION 1..12: note = Description of Artificial Sequence: Synthetic peptide
  REGION 1..12: note = 2G4[CD28]_H1.12_L1.68 vlCDR1
RVSSSIQSTNLH

SEQ ID NO: 1181 - protein, 7 aa, synthetic construct
  REGION 1..7: note = Description of Artificial Sequence: Synthetic peptide
  REGION 1..7: note = 2G4[CD28]_H1.12_L1.68 vlCDR2
GTSNLAS

SEQ ID NO: 1182 - protein, 10 aa, synthetic construct
  REGION 1..10: note = Description of Artificial Sequence: Synthetic peptide
  REGION 1..10: note = 2G4[CD28]_H1.12_L1.68 vlCDR3
QQWSSYPLYT

SEQ ID NO: 1183 - protein, 118 aa, synthetic construct; identical to SEQ ID NO: 747
  REGION 1..118: note = Description of Artificial Sequence: Synthetic polypeptide
  REGION 1..118: note = 2G4[CD28]_H1.12_L1.14 Variable Heavy (vh) Domain

SEQ ID NO: 1184 - protein, 5 aa, synthetic construct
  REGION 1..5: note = Description of Artificial Sequence: Synthetic peptide
  REGION 1..5: note = 2G4[CD28]_H1.12_L1.14 vhCDR1
VYDMS

SEQ ID NO: 1185 - protein, 17 aa, synthetic construct
  REGION 1..17: note = Description of Artificial Sequence: Synthetic peptide
  REGION 1..17: note = 2G4[CD28]_H1.12_L1.14 vhCDR2
TISSGGSFTHYPDSVKG

SEQ ID NO: 1186 - protein, 9 aa, synthetic construct
  REGION 1..9: note = Description of Artificial Sequence: Synthetic peptide
  REGION 1..9: note = 2G4[CD28]_H1.12_L1.14 vhCDR3
RSLDWYFDV

SEQ ID NO: 1187 - protein, 109 aa, synthetic construct; identical to SEQ ID NO: 811
  REGION 1..109: note = Description of Artificial Sequence: Synthetic polypeptide
  REGION 1..109: note = 2G4[CD28]_H1.12_L1.14 Variable Light (vl) Domain

SEQ ID NO: 1188 - protein, 12 aa, synthetic construct
  REGION 1..12: note = Description of Artificial Sequence: Synthetic peptide
  REGION 1..12: note = 2G4[CD28]_H1.12_L1.14 vlCDR1
RVSSSIQSSNLH

SEQ ID NO: 1189 - protein, 7 aa, synthetic construct
  REGION 1..7: note = Description of Artificial Sequence: Synthetic peptide
  REGION 1..7: note = 2G4[CD28]_H1.12_L1.14 vlCDR2
GTSNLAS

SEQ ID NO: 1190 - protein, 10 aa, synthetic construct
  REGION 1..10: note = Description of Artificial Sequence: Synthetic peptide
  REGION 1..10: note = 2G4[CD28]_H1.12_L1.14 vlCDR3
QQWSSYPLYT

SEQ ID NO: 1191 - protein, 118 aa, synthetic construct; identical to SEQ ID NO: 739
  REGION 1..118: note = Description of Artificial Sequence: Synthetic polypeptide
  REGION 1..118: note = 2G4[CD28]_H1.4_L1.23 Variable Heavy (vh) Domain

SEQ ID NO: 1192 - protein, 5 aa, synthetic construct
  REGION 1..5: note = Description of Artificial Sequence: Synthetic peptide
  REGION 1..5: note = 2G4[CD28]_H1.4_L1.23 vhCDR1
SYDMS

SEQ ID NO: 1193 - protein, 17 aa, synthetic construct
  REGION 1..17: note = Description of Artificial Sequence: Synthetic peptide
  REGION 1..17: note = 2G4[CD28]_H1.4_L1.23 vhCDR2
TISSGGSFTHYPDSVKG

SEQ ID NO: 1194 - protein, 9 aa, synthetic construct
  REGION 1..9: note = Description of Artificial Sequence: Synthetic peptide
  REGION 1..9: note = 2G4[CD28]_H1.4_L1.23 vhCDR3
RSLDWYFDV

SEQ ID NO: 1195 - protein, 109 aa, synthetic construct; identical to SEQ ID NO: 820
  REGION 1..109: note = Description of Artificial Sequence: Synthetic polypeptide
  REGION 1..109: note = 2G4[CD28]_H1.4_L1.23 Variable Light (vl) Domain

SEQ ID NO: 1196 - protein, 12 aa, synthetic construct
  REGION 1..12: note = Description of Artificial Sequence: Synthetic peptide
  REGION 1..12: note = 2G4[CD28]_H1.4_L1.23 vlCDR1
RVSLSIQSSNLH

SEQ ID NO: 1197 - protein, 7 aa, synthetic construct
  REGION 1..7: note = Description of Artificial Sequence: Synthetic peptide
  REGION 1..7: note = 2G4[CD28]_H1.4_L1.23 vlCDR2
GTNLLAS

SEQ ID NO: 1198 - protein, 10 aa, synthetic construct
  REGION 1..10: note = Description of Artificial Sequence: Synthetic peptide
  REGION 1..10: note = 2G4[CD28]_H1.4_L1.23 vlCDR3
QQWSSYPLYT

SEQ ID NO: 1199 - protein, 118 aa, synthetic construct; identical to SEQ ID NO: 739
  REGION 1..118: note = Description of Artificial Sequence: Synthetic polypeptide
  REGION 1..118: note = 2G4[CD28]_H1.4_L1.24 Variable Heavy (vh) Domain

SEQ ID NO: 1200 - protein, 5 aa, synthetic construct
  REGION 1..5: note = Description of Artificial Sequence: Synthetic peptide
  REGION 1..5: note = 2G4[CD28]_H1.4_L1.24 vhCDR1
SYDMS

SEQ ID NO: 1201 - protein, 17 aa, synthetic construct
  REGION 1..17: note = Description of Artificial Sequence: Synthetic peptide
  REGION 1..17: note = 2G4[CD28]_H1.4_L1.24 vhCDR2
TISSGGSFTHYPDSVKG

SEQ ID NO: 1202 - protein, 9 aa, synthetic construct
  REGION 1..9: note = Description of Artificial Sequence: Synthetic peptide
  REGION 1..9: note = 2G4[CD28]_H1.4_L1.24 vhCDR3
RSLDWYFDV

SEQ ID NO: 1203 - protein, 109 aa, synthetic construct; identical to SEQ ID NO: 821
  REGION 1..109: note = Description of Artificial Sequence: Synthetic polypeptide
  REGION 1..109: note = 2G4[CD28]_H1.4_L1.24 Variable Light (vl) Domain

SEQ ID NO: 1204 - protein, 12 aa, synthetic construct
  REGION 1..12: note = Description of Artificial Sequence: Synthetic peptide
  REGION 1..12: note = 2G4[CD28]_H1.4_L1.24 vlCDR1
RVSSSIQSTNLH

SEQ ID NO: 1205 - protein, 7 aa, synthetic construct
  REGION 1..7: note = Description of Artificial Sequence: Synthetic peptide
  REGION 1..7: note = 2G4[CD28]_H1.4_L1.24 vlCDR2
GTSVLAT

SEQ ID NO: 1206 - protein, 10 aa, synthetic construct
  REGION 1..10: note = Description of Artificial Sequence: Synthetic peptide
  REGION 1..10: note = 2G4[CD28]_H1.4_L1.24 vlCDR3
QQWSSYPLYT

SEQ ID NO: 1207 - protein, 118 aa, synthetic construct; identical to SEQ ID NO: 744
  REGION 1..118: note = Description of Artificial Sequence: Synthetic polypeptide
  REGION 1..118: note = 2G4[CD28]_H1.9_L1 Variable Heavy (vh) Domain

SEQ ID NO: 1208 - protein, 5 aa, synthetic construct
  REGION 1..5: note = Description of Artificial Sequence: Synthetic peptide
  REGION 1..5: note = 2G4[CD28]_H1.9_L1 vhCDR1
FRDMS

SEQ ID NO: 1209 - protein, 17 aa, synthetic construct
  REGION 1..17: note = Description of Artificial Sequence: Synthetic peptide
  REGION 1..17: note = 2G4[CD28]_H1.9_L1 vhCDR2
TISSGGSFTHYPDSVKG

SEQ ID NO: 1210 - protein, 9 aa, synthetic construct
  REGION 1..9: note = Description of Artificial Sequence: Synthetic peptide
  REGION 1..9: note = 2G4[CD28]_H1.9_L1 vhCDR3
RSGDWYFDV

SEQ ID NO: 1211 - protein, 109 aa, synthetic construct; identical to SEQ ID NO: 1046
  REGION 1..109: note = Description of Artificial Sequence: Synthetic polypeptide
  REGION 1..109: note = 2G4[CD28]_H1.9_L1 Variable Light (vl) Domain

SEQ ID NO: 1212 - protein, 12 aa, synthetic construct
  REGION 1..12: note = Description of Artificial Sequence: Synthetic peptide
  REGION 1..12: note = 2G4[CD28]_H1.9_L1 vlCDR1
RVSSSISSSNLH

SEQ ID NO: 1213 - protein, 7 aa, synthetic construct
  REGION 1..7: note = Description of Artificial Sequence: Synthetic peptide
  REGION 1..7: note = 2G4[CD28]_H1.9_L1 vlCDR2
GTSNLAS

SEQ ID NO: 1214 - protein, 10 aa, synthetic construct
  REGION 1..10: note = Description of Artificial Sequence: Synthetic peptide
  REGION 1..10: note = 2G4[CD28]_H1.9_L1 vlCDR3
QQWSSYPLYT

SEQ ID NO: 1215 - protein, 118 aa, synthetic construct; identical to SEQ ID NO: 797
  REGION 1..118: note = Description of Artificial Sequence: Synthetic polypeptide
  REGION 1..118: note = 2G4[CD28]_H1.62_L1.63 Variable Heavy (vh) Domain

SEQ ID NO: 1216 - protein, 5 aa, synthetic construct
  REGION 1..5: note = Description of Artificial Sequence: Synthetic peptide
  REGION 1..5: note = 2G4[CD28]_H1.62_L1.63 vhCDR1
SYDMS

SEQ ID NO: 1217 - protein, 17 aa, synthetic construct
  REGION 1..17: note = Description of Artificial Sequence: Synthetic peptide
  REGION 1..17: note = 2G4[CD28]_H1.62_L1.63 vhCDR2
TISSGGSFTHYPDSVKG

SEQ ID NO: 1218 - protein, 9 aa, synthetic construct
  REGION 1..9: note = Description of Artificial Sequence: Synthetic peptide
  REGION 1..9: note = 2G4[CD28]_H1.62_L1.63 vhCDR3
RSGDWYFDV

SEQ ID NO: 1219 - protein, 109 aa, synthetic construct; identical to SEQ ID NO: 860
  REGION 1..109: note = Description of Artificial Sequence: Synthetic polypeptide
  REGION 1..109: note = 2G4[CD28]_H1.62_L1.63 Variable Light (vl) Domain

SEQ ID NO: 1220 - protein, 12 aa, synthetic construct
  REGION 1..12: note = Description of Artificial Sequence: Synthetic peptide
  REGION 1..12: note = 2G4[CD28]_H1.62_L1.63 vlCDR1
RASSSISSSNLH

SEQ ID NO: 1221 - protein, 7 aa, synthetic construct
  REGION 1..7: note = Description of Artificial Sequence: Synthetic peptide
  REGION 1..7: note = 2G4[CD28]_H1.62_L1.63 vlCDR2
GTSNLAS

SEQ ID NO: 1222 - protein, 10 aa, synthetic construct
  REGION 1..10: note = Description of Artificial Sequence: Synthetic peptide
  REGION 1..10: note = 2G4[CD28]_H1.62_L1.63 vlCDR3
QQWSSYPLYT

SEQ ID NO: 1223 - protein, 118 aa, synthetic construct; identical to SEQ ID NO: 741
  REGION 1..118: note = Description of Artificial Sequence: Synthetic polypeptide
  REGION 1..118: note = 2G4[CD28]_H1.6_L1.3 Variable Heavy (vh) Domain

SEQ ID NO: 1224 - protein, 5 aa, synthetic construct
  REGION 1..5: note = Description of Artificial Sequence: Synthetic peptide
  REGION 1..5: note = 2G4[CD28]_H1.6_L1.3 vhCDR1
SRDMS

SEQ ID NO: 1225 - protein, 17 aa, synthetic construct
  REGION 1..17: note = Description of Artificial Sequence: Synthetic peptide
  REGION 1..17: note = 2G4[CD28]_H1.6_L1.3 vhCDR2
TISSGGRFTHYPDSVKG

SEQ ID NO: 1226 - protein, 9 aa, synthetic construct
  REGION 1..9: note = Description of Artificial Sequence: Synthetic peptide
  REGION 1..9: note = 2G4[CD28]_H1.6_L1.3 vhCDR3
RSGDWYFDV

SEQ ID NO: 1227 - protein, 109 aa, synthetic construct; identical to SEQ ID NO: 800
  REGION 1..109: note = Description of Artificial Sequence: Synthetic polypeptide
  REGION 1..109: note = 2G4[CD28]_H1.6_L1.3 Variable Light (vl) Domain

SEQ ID NO: 1228 - protein, 12 aa, synthetic construct
  REGION 1..12: note = Description of Artificial Sequence: Synthetic peptide
  REGION 1..12: note = 2G4[CD28]_H1.6_L1.3 vlCDR1
RVSSSISSSNLH

SEQ ID NO: 1229 - protein, 7 aa, synthetic construct
  REGION 1..7: note = Description of Artificial Sequence: Synthetic peptide
  REGION 1..7: note = 2G4[CD28]_H1.6_L1.3 vlCDR2
GTSNLAS

SEQ ID NO: 1230 - protein, 10 aa, synthetic construct
  REGION 1..10: note = Description of Artificial Sequence: Synthetic peptide
  REGION 1..10: note = 2G4[CD28]_H1.6_L1.3 vlCDR3
QQWSSYPLWT

SEQ ID NO: 1231 - protein, 118 aa, synthetic construct; identical to SEQ ID NO: 796
  REGION 1..118: note = Description of Artificial Sequence: Synthetic polypeptide
  REGION 1..118: note = 2G4[CD28]_H1.61_L1.61 Variable Heavy (vh) Domain

SEQ ID NO: 1232 - protein, 5 aa, synthetic construct
  REGION 1..5: note = Description of Artificial Sequence: Synthetic peptide
  REGION 1..5: note = 2G4[CD28]_H1.61_L1.61 vhCDR1
SYDMS

SEQ ID NO: 1233 - protein, 17 aa, synthetic construct
  REGION 1..17: note = Description of Artificial Sequence: Synthetic peptide
  REGION 1..17: note = 2G4[CD28]_H1.61_L1.61 vhCDR2
TISSGGSFTHYPDSVKG

SEQ ID NO: 1234 - protein, 9 aa, synthetic construct
  REGION 1..9: note = Description of Artificial Sequence: Synthetic peptide
  REGION 1..9: note = 2G4[CD28]_H1.61_L1.61 vhCDR3
RSLDWYFDV

SEQ ID NO: 1235 - protein, 109 aa, synthetic construct; identical to SEQ ID NO: 858
  REGION 1..109: note = Description of Artificial Sequence: Synthetic polypeptide
  REGION 1..109: note = 2G4[CD28]_H1.61_L1.61 Variable Light (vl) Domain

SEQ ID NO: 1236 - protein, 12 aa, synthetic construct
  REGION 1..12: note = Description of Artificial Sequence: Synthetic peptide
  REGION 1..12: note = 2G4[CD28]_H1.61_L1.61 vlCDR1
RASLSIQSSNLH

SEQ ID NO: 1237 - protein, 7 aa, synthetic construct
  REGION 1..7: note = Description of Artificial Sequence: Synthetic peptide
  REGION 1..7: note = 2G4[CD28]_H1.61_L1.61 vlCDR2
GTNLLAS

SEQ ID NO: 1238 - protein, 10 aa, synthetic construct
  REGION 1..10: note = Description of Artificial Sequence: Synthetic peptide
  REGION 1..10: note = 2G4[CD28]_H1.61_L1.61 vlCDR3
QQWSSYPLYT

SEQ ID NO: 1239 - protein, 118 aa, synthetic construct; identical to SEQ ID NO: 795
  REGION 1..118: note = Description of Artificial Sequence: Synthetic polypeptide
  REGION 1..118: note = 2G4[CD28]_H1.60_L1.60 Variable Heavy (vh) Domain

SEQ ID NO: 1240 - protein, 5 aa, synthetic construct
  REGION 1..5: note = Description of Artificial Sequence: Synthetic peptide
  REGION 1..5: note = 2G4[CD28]_H1.60_L1.60 vhCDR1
SSDMS

SEQ ID NO: 1241 - protein, 17 aa, synthetic construct
  REGION 1..17: note = Description of Artificial Sequence: Synthetic peptide
  REGION 1..17: note = 2G4[CD28]_H1.60_L1.60 vhCDR2
TISSGGSFTHYPDSVKG

SEQ ID NO: 1242 - protein, 9 aa, synthetic construct
  REGION 1..9: note = Description of Artificial Sequence: Synthetic peptide
  REGION 1..9: note = 2G4[CD28]_H1.60_L1.60 vhCDR3
RSLDWYFDV

SEQ ID NO: 1243 - protein, 109 aa, synthetic construct; identical to SEQ ID NO: 857
  REGION 1..109: note = Description of Artificial Sequence: Synthetic polypeptide
  REGION 1..109: note = 2G4[CD28]_H1.60_L1.60 Variable Light (vl) Domain

SEQ ID NO: 1244 - protein, 12 aa, synthetic construct
  REGION 1..12: note = Description of Artificial Sequence: Synthetic peptide
  REGION 1..12: note = 2G4[CD28]_H1.60_L1.60 vlCDR1
RASSSISSSNLH

SEQ ID NO: 1245 - protein, 7 aa, synthetic construct
  REGION 1..7: note = Description of Artificial Sequence: Synthetic peptide
  REGION 1..7: note = 2G4[CD28]_H1.60_L1.60 vlCDR2
GTSNLAS

SEQ ID NO: 1246 - protein, 10 aa, synthetic construct
  REGION 1..10: note = Description of Artificial Sequence: Synthetic peptide
  REGION 1..10: note = 2G4[CD28]_H1.60_L1.60 vlCDR3
QQWSSYPLWT

SEQ ID NO: 1247 - protein, 118 aa, synthetic construct; identical to SEQ ID NO: 794
  REGION 1..118: note = Description of Artificial Sequence: Synthetic polypeptide
  REGION 1..118: note = 2G4[CD28]_H1.59_L1.60 Variable Heavy (vh) Domain

SEQ ID NO: 1248 - protein, 5 aa, synthetic construct
  REGION 1..5: note = Description of Artificial Sequence: Synthetic peptide
  REGION 1..5: note = 2G4[CD28]_H1.59_L1.60 vhCDR1
SRDMS

SEQ ID NO: 1249 - protein, 17 aa, synthetic construct
  REGION 1..17: note = Description of Artificial Sequence: Synthetic peptide
  REGION 1..17: note = 2G4[CD28]_H1.59_L1.60 vhCDR2
TISSGGRFTHYPDSVKG

SEQ ID NO: 1250 - protein, 9 aa, synthetic construct
  REGION 1..9: note = Description of Artificial Sequence: Synthetic peptide
  REGION 1..9: note = 2G4[CD28]_H1.59_L1.60 vhCDR3
RSGDWYFDV

SEQ ID NO: 1251 - protein, 109 aa, synthetic construct; identical to SEQ ID NO: 857
  REGION 1..109: note = Description of Artificial Sequence: Synthetic polypeptide
  REGION 1..109: note = 2G4[CD28]_H1.59_L1.60 Variable Light (vl) Domain

SEQ ID NO: 1252 - protein, 12 aa, synthetic construct
  REGION 1..12: note = Description of Artificial Sequence: Synthetic peptide
  REGION 1..12: note = 2G4[CD28]_H1.59_L1.60 vlCDR1
RASSSISSSNLH

SEQ ID NO: 1253 - protein, 7 aa, synthetic construct
  REGION 1..7: note = Description of Artificial Sequence: Synthetic peptide
  REGION 1..7: note = 2G4[CD28]_H1.59_L1.60 vlCDR2
GTSNLAS

SEQ ID NO: 1254 - protein, 10 aa, synthetic construct
  REGION 1..10: note = Description of Artificial Sequence: Synthetic peptide
  REGION 1..10: note = 2G4[CD28]_H1.59_L1.60 vlCDR3
QQWSSYPLWT

SEQ ID NO: 1255 - protein, 118 aa, synthetic construct; identical to SEQ ID NO: 749
  REGION 1..118: note = Description of Artificial Sequence: Synthetic polypeptide
  REGION 1..118: note = 2G4[CD28]_H1.14_L1.26 Variable Heavy (vh) Domain

SEQ ID NO: 1256 - protein, 5 aa, synthetic construct
  REGION 1..5: note = Description of Artificial Sequence: Synthetic peptide
  REGION 1..5: note = 2G4[CD28]_H1.14_L1.26 vhCDR1
SSDMS

SEQ ID NO: 1257 - protein, 17 aa, synthetic construct
  REGION 1..17: note = Description of Artificial Sequence: Synthetic peptide
  REGION 1..17: note = 2G4[CD28]_H1.14_L1.26 vhCDR2
TISSGGSFTHYPDSVKG

SEQ ID NO: 1258 - protein, 9 aa, synthetic construct
  REGION 1..9: note = Description of Artificial Sequence: Synthetic peptide
  REGION 1..9: note = 2G4[CD28]_H1.14_L1.26 vhCDR3
RSLDWYFDV

SEQ ID NO: 1259 - protein, 109 aa, synthetic construct; identical to SEQ ID NO: 823
  REGION 1..109: note = Description of Artificial Sequence: Synthetic polypeptide
  REGION 1..109: note = 2G4[CD28]_H1.14_L1.26 Variable Light (vl) Domain

SEQ ID NO: 1260 - protein, 12 aa, synthetic construct
  REGION 1..12: note = Description of Artificial Sequence: Synthetic peptide
  REGION 1..12: note = 2G4[CD28]_H1.14_L1.26 vlCDR1
RASSSIQDSNLH

SEQ ID NO: 1261 - protein, 7 aa, synthetic construct
  REGION 1..7: note = Description of Artificial Sequence: Synthetic peptide
  REGION 1..7: note = 2G4[CD28]_H1.14_L1.26 vlCDR2
GTSNLRS

SEQ ID NO: 1262 - protein, 10 aa, synthetic construct
  REGION 1..10: note = Description of Artificial Sequence: Synthetic peptide
  REGION 1..10: note = 2G4[CD28]_H1.14_L1.26 vlCDR3
QQWSSYPLYT

SEQ ID NO: 1263 - protein, 118 aa, synthetic construct; identical to SEQ ID NO: 1042
  REGION 1..118: note = Description of Artificial Sequence: Synthetic polypeptide
  REGION 1..118: note = 2G4[CD28]_H1_L1.27 Variable Heavy (vh) Domain

SEQ ID NO: 1264 - protein, 5 aa, synthetic construct
  REGION 1..5: note = Description of Artificial Sequence: Synthetic peptide
  REGION 1..5: note = 2G4[CD28]_H1_L1.27 vhCDR1
SYDMS

SEQ ID NO: 1265 - protein, 17 aa, synthetic construct
  REGION 1..17: note = Description of Artificial Sequence: Synthetic peptide
  REGION 1..17: note = 2G4[CD28]_H1_L1.27 vhCDR2
TISSGGSFTHYPDSVKG

SEQ ID NO: 1266 - protein, 9 aa, synthetic construct
  REGION 1..9: note = Description of Artificial Sequence: Synthetic peptide
  REGION 1..9: note = 2G4[CD28]_H1_L1.27 vhCDR3
RSGDWYFDV

SEQ ID NO: 1267 - protein, 109 aa, synthetic construct; identical to SEQ ID NO: 824
  REGION 1..109: note = Description of Artificial Sequence: Synthetic polypeptide
  REGION 1..109: note = 2G4[CD28]_H1_L1.27 Variable Light (vl) Domain

SEQ ID NO: 1268 - protein, 12 aa, synthetic construct
  REGION 1..12: note = Description of Artificial Sequence: Synthetic peptide
  REGION 1..12: note = 2G4[CD28]_H1_L1.27 vlCDR1
RVSSSIQGSNLH

SEQ ID NO: 1269 - protein, 7 aa, synthetic construct
  REGION 1..7: note = Description of Artificial Sequence: Synthetic peptide
  REGION 1..7: note = 2G4[CD28]_H1_L1.27 vlCDR2
GTSNLAS

SEQ ID NO: 1270 - protein, 10 aa, synthetic construct
  REGION 1..10: note = Description of Artificial Sequence: Synthetic peptide
  REGION 1..10: note = 2G4[CD28]_H1_L1.27 vlCDR3
QQWSSYPLYT

SEQ ID NO: 1271 - protein, 118 aa, synthetic construct; identical to SEQ ID NO: 743
  REGION 1..118: note = Description of Artificial Sequence: Synthetic polypeptide
  REGION 1..118: note = 2G4[CD28]_H1.8_L1.26 Variable Heavy (vh) Domain

SEQ ID NO: 1272 - protein, 5 aa, synthetic construct
  REGION 1..5: note = Description of Artificial Sequence: Synthetic peptide
  REGION 1..5: note = 2G4[CD28]_H1.8_L1.26 vhCDR1
SSDMS

SEQ ID NO: 1273 - protein, 17 aa, synthetic construct
  REGION 1..17: note = Description of Artificial Sequence: Synthetic peptide
  REGION 1..17: note = 2G4[CD28]_H1.8_L1.26 vhCDR2
TISSGGSFTHYPDSVKG

SEQ ID NO: 1274 - protein, 9 aa, synthetic construct
  REGION 1..9: note = Description of Artificial Sequence: Synthetic peptide
  REGION 1..9: note = 2G4[CD28]_H1.8_L1.26 vhCDR3
RSGDWYFDV

SEQ ID NO: 1275 - protein, 109 aa, synthetic construct; identical to SEQ ID NO: 823
  REGION 1..109: note = Description of Artificial Sequence: Synthetic polypeptide
  REGION 1..109: note = 2G4[CD28]_H1.8_L1.26 Variable Light (vl) Domain

SEQ ID NO: 1276 - protein, 12 aa, synthetic construct
  REGION 1..12: note = Description of Artificial Sequence: Synthetic peptide
  REGION 1..12: note = 2G4[CD28]_H1.8_L1.26 vlCDR1
RASSSIQDSNLH

SEQ ID NO: 1277 - protein, 7 aa, synthetic construct
  REGION 1..7: note = Description of Artificial Sequence: Synthetic peptide
  REGION 1..7: note = 2G4[CD28]_H1.8_L1.26 vlCDR2
GTSNLRS

SEQ ID NO: 1278 - protein, 10 aa, synthetic construct
  REGION 1..10: note = Description of Artificial Sequence: Synthetic peptide
  REGION 1..10: note = 2G4[CD28]_H1.8_L1.26 vlCDR3
QQWSSYPLYT

SEQ ID NO: 1279 - protein, 118 aa, synthetic construct; identical to SEQ ID NO: 1042
  REGION 1..118: note = Description of Artificial Sequence: Synthetic polypeptide
  REGION 1..118: note = 2G4[CD28]_H1_L1.25 Variable Heavy (vh) Domain

SEQ ID NO: 1280 - protein, 5 aa, synthetic construct
  REGION 1..5: note = Description of Artificial Sequence: Synthetic peptide
  REGION 1..5: note = 2G4[CD28]_H1_L1.25 vhCDR1
SYDMS

SEQ ID NO: 1281 - protein, 17 aa, synthetic construct
  REGION 1..17: note = Description of Artificial Sequence: Synthetic peptide
  REGION 1..17: note = 2G4[CD28]_H1_L1.25 vhCDR2
TISSGGSFTHYPDSVKG

SEQ ID NO: 1282 - protein, 9 aa, synthetic construct
  REGION 1..9: note = Description of Artificial Sequence: Synthetic peptide
  REGION 1..9: note = 2G4[CD28]_H1_L1.25 vhCDR3
RSGDWYFDV

SEQ ID NO: 1283 - protein, 109 aa, synthetic construct; identical to SEQ ID NO: 822
  REGION 1..109: note = Description of Artificial Sequence: Synthetic polypeptide
  REGION 1..109: note = 2G4[CD28]_H1_L1.25 Variable Light (vl) Domain

SEQ ID NO: 1284 - protein, 12 aa, synthetic construct
  REGION 1..12: note = Description of Artificial Sequence: Synthetic peptide
  REGION 1..12: note = 2G4[CD28]_H1_L1.25 vlCDR1
RVSSSIQPSNLH

SEQ ID NO: 1285 - protein, 7 aa, synthetic construct
  REGION 1..7: note = Description of Artificial Sequence: Synthetic peptide
  REGION 1..7: note = 2G4[CD28]_H1_L1.25 vlCDR2
GTSNLAS

SEQ ID NO: 1286 - protein, 10 aa, synthetic construct
  REGION 1..10: note = Description of Artificial Sequence: Synthetic peptide
  REGION 1..10: note = 2G4[CD28]_H1_L1.25 vlCDR3
QQWSSYPLYT

SEQ ID NO: 1287 - protein, 118 aa, synthetic construct; identical to SEQ ID NO: 745
  REGION 1..118: note = Description of Artificial Sequence: Synthetic polypeptide
  REGION 1..118: note = 2G4[CD28]_H1.10_L1.23 Variable Heavy (vh) Domain

SEQ ID NO: 1288 - protein, 5 aa, synthetic construct
  REGION 1..5: note = Description of Artificial Sequence: Synthetic peptide
  REGION 1..5: note = 2G4[CD28]_H1.10_L1.23 vhCDR1
WYDMS

SEQ ID NO: 1289 - protein, 17 aa, synthetic construct
  REGION 1..17: note = Description of Artificial Sequence: Synthetic peptide
  REGION 1..17: note = 2G4[CD28]_H1.10_L1.23 vhCDR2
TISSGGSFTHYPDSVKG

SEQ ID NO: 1290 - protein, 9 aa, synthetic construct
  REGION 1..9: note = Description of Artificial Sequence: Synthetic peptide
  REGION 1..9: note = 2G4[CD28]_H1.10_L1.23 vhCDR3
RSGDWYFDV

SEQ ID NO: 1291 - protein, 109 aa, synthetic construct; identical to SEQ ID NO: 820
  REGION 1..109: note = Description of Artificial Sequence: Synthetic polypeptide
  REGION 1..109: note = 2G4[CD28]_H1.10_L1.23 Variable Light (vl) Domain

SEQ ID NO: 1292 - protein, 12 aa, synthetic construct
  REGION 1..12: note = Description of Artificial Sequence: Synthetic peptide
  REGION 1..12: note = 2G4[CD28]_H1.10_L1.23 vlCDR1
RVSLSIQSSNLH

SEQ ID NO: 1293 - protein, 7 aa, synthetic construct
  REGION 1..7: note = Description of Artificial Sequence: Synthetic peptide
  REGION 1..7: note = 2G4[CD28]_H1.10_L1.23 vlCDR2
GTNLLAS

SEQ ID NO: 1294 - protein, 10 aa, synthetic construct
  REGION 1..10: note = Description of Artificial Sequence: Synthetic peptide
  REGION 1..10: note = 2G4[CD28]_H1.10_L1.23 vlCDR3
QQWSSYPLYT

SEQ ID NO: 1295 - protein, 118 aa, synthetic construct; identical to SEQ ID NO: 736
  REGION 1..118: note = Description of Artificial Sequence: Synthetic polypeptide
  REGION 1..118: note = 2G4[CD28]_H1.1_L1.1 Variable Heavy (vh) Domain

SEQ ID NO: 1296 - protein, 5 aa, synthetic construct
  REGION 1..5: note = Description of Artificial Sequence: Synthetic peptide
  REGION 1..5: note = 2G4[CD28]_H1.1_L1.1 vhCDR1
SRDMS

SEQ ID NO: 1297 - protein, 17 aa, synthetic construct
  REGION 1..17: note = Description of Artificial Sequence: Synthetic peptide
  REGION 1..17: note = 2G4[CD28]_H1.1_L1.1 vhCDR2
TISSGGSFTHYPDSVKG

SEQ ID NO: 1298 - protein, 9 aa, synthetic construct
  REGION 1..9: note = Description of Artificial Sequence: Synthetic peptide
  REGION 1..9: note = 2G4[CD28]_H1.1_L1.1 vhCDR3
RSGDWYFDV

SEQ ID NO: 1299 - protein, 109 aa, synthetic construct; identical to SEQ ID NO: 798
  REGION 1..109: note = Description of Artificial Sequence: Synthetic polypeptide
  REGION 1..109: note = 2G4[CD28]_H1.1_L1.1 Variable Light (vl) Domain

SEQ ID NO: 1300 - protein, 12 aa, synthetic construct
  REGION 1..12: note = Description of Artificial Sequence: Synthetic peptide
  REGION 1..12: note = 2G4[CD28]_H1.1_L1.1 vlCDR1
RVSSSISSSNLH

SEQ ID NO: 1301 - protein, 7 aa, synthetic construct
  REGION 1..7: note = Description of Artificial Sequence: Synthetic peptide
  REGION 1..7: note = 2G4[CD28]_H1.1_L1.1 vlCDR2
GTSNLAS

SEQ ID NO: 1302 - protein, 10 aa, synthetic construct
  REGION 1..10: note = Description of Artificial Sequence: Synthetic peptide
  REGION 1..10: note = 2G4[CD28]_H1.1_L1.1 vlCDR3
QQWWSYPLYT

SEQ ID NO: 1303 - protein, 118 aa, synthetic construct; identical to SEQ ID NO: 1042
  REGION 1..118: note = Description of Artificial Sequence: Synthetic polypeptide
  REGION 1..118: note = 2G4[CD28]_H1_L1.29 Variable Heavy (vh) Domain

SEQ ID NO: 1304 - protein, 5 aa, synthetic construct
  REGION 1..5: note = Description of Artificial Sequence: Synthetic peptide
  REGION 1..5: note = 2G4[CD28]_H1_L1.29 vhCDR1
SYDMS

SEQ ID NO: 1305 - protein, 17 aa, synthetic construct
  REGION 1..17: note = Description of Artificial Sequence: Synthetic peptide
  REGION 1..17: note = 2G4[CD28]_H1_L1.29 vhCDR2
TISSGGSFTHYPDSVKG

SEQ ID NO: 1306 - protein, 9 aa, synthetic construct
  REGION 1..9: note = Description of Artificial Sequence: Synthetic peptide
  REGION 1..9: note = 2G4[CD28]_H1_L1.29 vhCDR3
RSGDWYFDV

SEQ ID NO: 1307 - protein, 109 aa, synthetic construct; identical to SEQ ID NO: 826
  REGION 1..109: note = Description of Artificial Sequence: Synthetic polypeptide
  REGION 1..109: note = 2G4[CD28]_H1_L1.29 Variable Light (vl) Domain

SEQ ID NO: 1308 - protein, 12 aa, synthetic construct
  REGION 1..12: note = Description of Artificial Sequence: Synthetic peptide
  REGION 1..12: note = 2G4[CD28]_H1_L1.29 vlCDR1
RVSSRIVLSNLH

SEQ ID NO: 1309 - protein, 7 aa, synthetic construct
  REGION 1..7: note = Description of Artificial Sequence: Synthetic peptide
  REGION 1..7: note = 2G4[CD28]_H1_L1.29 vlCDR2
GTSVLAT

SEQ ID NO: 1310 - protein, 10 aa, synthetic construct
  REGION 1..10: note = Description of Artificial Sequence: Synthetic peptide
  REGION 1..10: note = 2G4[CD28]_H1_L1.29 vlCDR3
QQWSSYPLWT

SEQ ID NO: 1311 - protein, 449 aa, synthetic construct
  REGION 1..449: note = Description of Artificial Sequence: Synthetic polypeptide
  REGION 1..449: note = XENP34963 Chain 1 - avelumab[PD-L1]_H1_IgG1_pI(-)_Isosteric_A_/P VA_/S267K/L368D/K370S
EVQLLESGGGLVQPGGSLRLSCAASGFTFSSYIMMWVRQAPGKGLEWVSSIYPSGGITFYADTVKGRFTISRDNSKNTLYLQMNSLRAEDTAVYYCARIKLGTVTTVDYWGQGTLVTVSSASTKGPSVFPLAPSSKSTSGGTAALGCLVKDYFPEPVTVSWNSGALTSGVHTFPAVLQSSGLYSLSSVVTVPSSSLGTQTYICNVNHKPSDTKVDKKVEPKSCDKTHTCPPCPAPPVAGPSVFLFPPKPKDTLMISRTPEVTCVVVDVKHEDPEVKFNWYVDGVEVHNAKTKPREEEYNSTYRVVSVLTVLHQDWLNGKEYKCKVSNKALPAPIEKTISKAKGQPREPQVYTLPPSREEMTKNQVSLTCDVSGFYPSDIAVEWESDGQPENNYKTTPPVLDSDGSFFLYSKLTVDKSRWEQGDVFSCSVMHEALHNHYTQKSLSLSPGK

SEQ ID NO: 1312 - protein, 479 aa, synthetic construct
  REGION 1..479: note = Description of Artificial Sequence: Synthetic polypeptide
  REGION 1..479: note = XENP34963 Chain 2 - 1A7[CD28]_H1.14_L1_scFv(GKPGS)4_Fc(216)_IgG1 _C220S/PVA_/S267K/S364K/E357Q
EVQLLESGGGLVQPGGSLRLSCAASGFTFSSYYMSWVRQAPGKGLEWVSTISESGDSTYYADSVKGRFTISRDNSKNTLYLQMNSLRAEDTAVYYCAKSGPGLRQVGFDYWGQGTLVTVSSGKPGSGKPGSGKPGSGKPGSDIQMTQSPSSLSASVGDRVTITCRASQSISSYLNWYQQKPGKAPKLLIYAASSLQSGVPSRFSGSGSGTDFTLTISSLQPEDFATYYCQQSYSTPFTFGQGTKLEIKEPKSSDKTHTCPPCPAPPVAGPSVFLFPPKPKDTLMISRTPEVTCVVVDVKHEDPEVKFNWYVDGVEVHNAKTKPREEQYNSTYRVVSVLTVLHQDWLNGKEYKCKVSNKALPAPIEKTISKAKGQPREPQVYTLPPSREQMTKNQVKLTCLVKGFYPSDIAVEWESNGQPENNYKTTPPVLDSDGSFFLYSKLTVDKSRWQQGNVFSCSVMHEALHNHYTQKSLSLSPGK

SEQ ID NO: 1313 - protein, 216 aa, synthetic construct
  REGION 1..216: note = Description of Artificial Sequence: Synthetic polypeptide
  REGION 1..216: note = XENP34963 Chain 3 - avelumab[PD-L1]_L1 Light Chain
QSALTQPASVSGSPGQSITISCTGTSSDVGGYNYVSWYQQHPGKAPKLMIYDVSNRPSGVSNRFSGSKSGNTASLTISGLQAEDEADYYCSSYTSSSTRVFGTGTKVTVLGQPKAAPSVTLFPPSSEELQANKATLVCLISDFYPGAVTVAWKADSSPVKAGVETTTPSKQSNNKYAASSYLSLTPEQWKSHRSYSCQVTHEGSTVEKTVAPTECS

SEQ ID NO: 1314 - protein, 447 aa, synthetic construct; identical to SEQ ID NO: 1052
  REGION 1..447: note = Description of Artificial Sequence: Synthetic polypeptide
  REGION 1..447: note = XENP36233 Chain 1 - 2G4[PD-L1]_H1_IgG1_pI(-)_Isosteric_A_/PVA_/S 267K/L368D/K370S

SEQ ID NO: 1315 - protein, 479 aa, synthetic construct; identical to SEQ ID NO: 1312
  REGION 1..479: note = Description of Artificial Sequence: Synthetic polypeptide
  REGION 1..479: note = XENP36233 Chain 2 - 1A7[CD28]_H1.14_L1_scFv(GKPGS)4_Fc(216)_IgG1 _C220S/PVA_/S267K/S364K/E357Q

SEQ ID NO: 1316 - protein, 216 aa, synthetic construct; identical to SEQ ID NO: 1051
  REGION 1..216: note = Description of Artificial Sequence: Synthetic polypeptide
  REGION 1..216: note = XENP36233 Chain 3 - 2G4[PD-L1]_L1 Light Chain

SEQ ID NO: 1317 - protein, 447 aa, synthetic construct
  REGION 1..447: note = Description of Artificial Sequence: Synthetic polypeptide
  REGION 1..447: note = XENP36764 Chain 1 - 2G4[PD-L1]_H1_IgG1_pI(-)_Isosteric_A_/PVA_/S 267K/L368D/K370S/M428L/N434S
EVQLLESGGGLVQPGGSLRLSCAASGFTFSSYDMSWVRQAPGKRLEWVSTISSGGSFTHYPDSVKGRFTISRDNSKNTLYLQMNSLRAEDTAVYYCVRRSGDWYFDVWGAGTTVTVSSASTKGPSVFPLAPSSKSTSGGTAALGCLVKDYFPEPVTVSWNSGALTSGVHTFPAVLQSSGLYSLSSVVTVPSSSLGTQTYICNVNHKPSDTKVDKKVEPKSCDKTHTCPPCPAPPVAGPSVFLFPPKPKDTLMISRTPEVTCVVVDVKHEDPEVKFNWYVDGVEVHNAKTKPREEEYNSTYRVVSVLTVLHQDWLNGKEYKCKVSNKALPAPIEKTISKAKGQPREPQVYTLPPSREEMTKNQVSLTCDVSGFYPSDIAVEWESDGQPENNYKTTPPVLDSDGSFFLYSKLTVDKSRWEQGDVFSCSVLHEALHSHYTQKSLSLSPGK

SEQ ID NO: 1318 - protein, 479 aa, synthetic construct
  REGION 1..479: note = Description of Artificial Sequence: Synthetic polypeptide
  REGION 1..479: note = XENP36764 Chain 2 - 1A7[CD28]_H1.14_L1_scFv(GKPGS)4_Fc(216)_IgG1 _C220S/PVA_/S267K/S364K/E357Q/M428L/N434S
EVQLLESGGGLVQPGGSLRLSCAASGFTFSSYYMSWVRQAPGKGLEWVSTISESGDSTYYADSVKGRFTISRDNSKNTLYLQMNSLRAEDTAVYYCAKSGPGLRQVGFDYWGQGTLVTVSSGKPGSGKPGSGKPGSGKPGSDIQMTQSPSSLSASVGDRVTITCRASQSISSYLNWYQQKPGKAPKLLIYAASSLQSGVPSRFSGSGSGTDFTLTISSLQPEDFATYYCQQSYSTPFTFGQGTKLEIKEPKSSDKTHTCPPCPAPPVAGPSVFLFPPKPKDTLMISRTPEVTCVVVDVKHEDPEVKFNWYVDGVEVHNAKTKPREEQYNSTYRVVSVLTVLHQDWLNGKEYKCKVSNKALPAPIEKTISKAKGQPREPQVYTLPPSREQMTKNQVKLTCLVKGFYPSDIAVEWESNGQPENNYKTTPPVLDSDGSFFLYSKLTVDKSRWQQGNVFSCSVLHEALHSHYTQKSLSLSPGK

SEQ ID NO: 1319 - protein, 216 aa, synthetic construct; identical to SEQ ID NO: 1051
  REGION 1..216: note = Description of Artificial Sequence: Synthetic polypeptide
  REGION 1..216: note = XENP36764 Chain 3 - 2G4[PD-L1]_L1 Light Chain

SEQ ID NO: 1320 - protein, 447 aa, synthetic construct; identical to SEQ ID NO: 1052
  REGION 1..447: note = Description of Artificial Sequence: Synthetic polypeptide
  REGION 1..447: note = XENP37261 Chain 1 - 2G4[PD-L1]_H1_IgG1_pI(-)_Isosteric_A_/PVA_/S 267K/L368D/K370S

SEQ ID NO: 1321 - protein, 479 aa, synthetic construct
  REGION 1..479: note = Description of Artificial Sequence: Synthetic polypeptide
  REGION 1..479: note = XENP37261 Chain 2 - 1A7[CD28]_H1.14_L1.71_scFv(GKPGS)4_Fc(216)_I gG1_C220S/PVA_/S267K/S364K/E357Q
EVQLLESGGGLVQPGGSLRLSCAASGFTFSSYYMSWVRQAPGKGLEWVSTISESGDSTYYADSVKGRFTISRDNSKNTLYLQMNSLRAEDTAVYYCAKSGPGLRQVGFDYWGQGTLVTVSSGKPGSGKPGSGKPGSGKPGSDIQMTQSPSSLSASVGDRVTITCRASQSISSYLNWYQQKPGKAPKLLIYAASSLQSGVPSRFSGSGSGTDFTLTISSLQPEDFATYYCQQVYSTPFTFGQGTKLEIKEPKSSDKTHTCPPCPAPPVAGPSVFLFPPKPKDTLMISRTPEVTCVVVDVKHEDPEVKFNWYVDGVEVHNAKTKPREEQYNSTYRVVSVLTVLHQDWLNGKEYKCKVSNKALPAPIEKTISKAKGQPREPQVYTLPPSREQMTKNQVKLTCLVKGFYPSDIAVEWESNGQPENNYKTTPPVLDSDGSFFLYSKLTVDKSRWQQGNVFSCSVMHEALHNHYTQKSLSLSPGK

SEQ ID NO: 1322 - protein, 216 aa, synthetic construct; identical to SEQ ID NO: 1051
  REGION 1..216: note = Description of Artificial Sequence: Synthetic polypeptide
  REGION 1..216: note = XENP37261 Chain 3 - 2G4[PD-L1]_L1

SEQ ID NO: 1323 - protein, 447 aa, synthetic construct; identical to SEQ ID NO: 1317
  REGION 1..447: note = Description of Artificial Sequence: Synthetic polypeptide
  REGION 1..447: note = XENP37302 Chain 1 - 2G4[PD-L1]_H1_IgG1_pI(-)_Isosteric_A_/PVA_/S 267K/L368D/K370S/M428L/N434S

SEQ ID NO: 1324 - protein, 479 aa, synthetic construct
  REGION 1..479: note = Description of Artificial Sequence: Synthetic polypeptide
  REGION 1..479: note = XENP37302 Chain 2 - 1A7[CD28]_H1.14_L1.71_scFv(GKPGS)4_Fc(216)_I gG1_C220S/PVA_/S267K/S364K/E357Q/M428L/N434S
EVQLLESGGGLVQPGGSLRLSCAASGFTFSSYYMSWVRQAPGKGLEWVSTISESGDSTYYADSVKGRFTISRDNSKNTLYLQMNSLRAEDTAVYYCAKSGPGLRQVGFDYWGQGTLVTVSSGKPGSGKPGSGKPGSGKPGSDIQMTQSPSSLSASVGDRVTITCRASQSISSYLNWYQQKPGKAPKLLIYAASSLQSGVPSRFSGSGSGTDFTLTISSLQPEDFATYYCQQVYSTPFTFGQGTKLEIKEPKSSDKTHTCPPCPAPPVAGPSVFLFPPKPKDTLMISRTPEVTCVVVDVKHEDPEVKFNWYVDGVEVHNAKTKPREEQYNSTYRVVSVLTVLHQDWLNGKEYKCKVSNKALPAPIEKTISKAKGQPREPQVYTLPPSREQMTKNQVKLTCLVKGFYPSDIAVEWESNGQPENNYKTTPPVLDSDGSFFLYSKLTVDKSRWQQGNVFSCSVLHEALHSHYTQKSLSLSPGK

SEQ ID NO: 1325 - protein, 216 aa, synthetic construct; identical to SEQ ID NO: 1051
  REGION 1..216: note = Description of Artificial Sequence: Synthetic polypeptide
  REGION 1..216: note = XENP37302 Chain 3 - 2G4[PD-L1]_L1 Light Chain

SEQ ID NO: 1326 - protein, 447 aa, synthetic construct; identical to SEQ ID NO: 1052
  REGION 1..447: note = Description of Artificial Sequence: Synthetic polypeptide
  REGION 1..447: note = XENP37412 Chain 1 - 2G4[PD-L1]_H1_IgG1_pI(-)_Isosteric_A_/PVA_/S 267K/L368D/K370S

SEQ ID NO: 1327 - protein, 479 aa, synthetic construct
  REGION 1..479: note = Description of Artificial Sequence: Synthetic polypeptide
  REGION 1..479: note = XENP37412 Chain 2 - 1A7[CD28]_L1_H1.14_scFv(GKPGS)4_Fc(216)_IgG1 _C220S/PVA_/S267K/S364K/E357Q
DIQMTQSPSSLSASVGDRVTITCRASQSISSYLNWYQQKPGKAPKLLIYAASSLQSGVPSRFSGSGSGTDFTLTISSLQPEDFATYYCQQSYSTPFTFGQGTKLEIKGKPGSGKPGSGKPGSGKPGSEVQLLESGGGLVQPGGSLRLSCAASGFTFSSYYMSWVRQAPGKGLEWVSTISESGDSTYYADSVKGRFTISRDNSKNTLYLQMNSLRAEDTAVYYCAKSGPGLRQVGFDYWGQGTLVTVSSEPKSSDKTHTCPPCPAPPVAGPSVFLFPPKPKDTLMISRTPEVTCVVVDVKHEDPEVKFNWYVDGVEVHNAKTKPREEQYNSTYRVVSVLTVLHQDWLNGKEYKCKVSNKALPAPIEKTISKAKGQPREPQVYTLPPSREQMTKNQVKLTCLVKGFYPSDIAVEWESNGQPENNYKTTPPVLDSDGSFFLYSKLTVDKSRWQQGNVFSCSVMHEALHNHYTQKSLSLSPGK

SEQ ID NO: 1328 - protein, 216 aa, synthetic construct; identical to SEQ ID NO: 1051
  REGION 1..216: note = Description of Artificial Sequence: Synthetic polypeptide
  REGION 1..216: note = XENP37412 Chain 3 - 2G4[PD-L1]_L1

SEQ ID NO: 1329 - protein, 447 aa, synthetic construct; identical to SEQ ID NO: 1052
  REGION 1..447: note = Description of Artificial Sequence: Synthetic polypeptide
  REGION 1..447: note = XENP37559 Chain 1 - 2G4[PD-L1]_H1_IgG1_pI(-)_Isosteric_A_/PVA_/S 267K/L368D/K370S

SEQ ID NO: 1330 - protein, 479 aa, synthetic construct
  REGION 1..479: note = Description of Artificial Sequence: Synthetic polypeptide
  REGION 1..479: note = XENP37559 Chain 2 - 1A7[CD28]_H1_L1.71_scFv(GKPGS)4_Fc(216)_IgG1 _C220S/PVA_/S267K/S364K/E357Q
EVQLLESGGGLVQPGGSLRLSCAASGFTFSSYAMSWVRQAPGKGLEWVSTISGSGDSTYYADSVKGRFTISRDNSKNTLYLQMNSLRAEDTAVYYCAKSGPGLRQVGFDYWGQGTLVTVSSGKPGSGKPGSGKPGSGKPGSDIQMTQSPSSLSASVGDRVTITCRASQSISSYLNWYQQKPGKAPKLLIYAASSLQSGVPSRFSGSGSGTDFTLTISSLQPEDFATYYCQQVYSTPFTFGQGTKLEIKEPKSSDKTHTCPPCPAPPVAGPSVFLFPPKPKDTLMISRTPEVTCVVVDVKHEDPEVKFNWYVDGVEVHNAKTKPREEQYNSTYRVVSVLTVLHQDWLNGKEYKCKVSNKALPAPIEKTISKAKGQPREPQVYTLPPSREQMTKNQVKLTCLVKGFYPSDIAVEWESNGQPENNYKTTPPVLDSDGSFFLYSKLTVDKSRWQQGNVFSCSVMHEALHNHYTQKSLSLSPGK

SEQ ID NO: 1331 - protein, 216 aa, synthetic construct; identical to SEQ ID NO: 1051
  REGION 1..216: note = Description of Artificial Sequence: Synthetic polypeptide
  REGION 1..216: note = XENP37559 Chain 3 - 2G4[PD-L1]_L1

SEQ ID NO: 1332 - protein, 447 aa, synthetic construct; identical to SEQ ID NO: 1052
  REGION 1..447: note = Description of Artificial Sequence: Synthetic polypeptide
  REGION 1..447: note = XENP37560 Chain 1 - 2G4[PD-L1]_H1_IgG1_pI(-)_Isosteric_A_/PVA_/S 267K/L368D/K370S

SEQ ID NO: 1333 - protein, 479 aa, synthetic construct
  REGION 1..479: note = Description of Artificial Sequence: Synthetic polypeptide
  REGION 1..479: note = XENP37560 Chain 2 - 1A7[CD28]_H1.1_L1.71_scFv(GKPGS)4_Fc(216)_Ig G1_C220S/PVA_/S267K/S364K/E357Q
EVQLLESGGGLVQPGGSLRLSCAASGFTFSSYYMSWVRQAPGKGLEWVSTISGSGDSTYYADSVKGRFTISRDNSKNTLYLQMNSLRAEDTAVYYCAKSGPGLRQVGFDYWGQGTLVTVSSGKPGSGKPGSGKPGSGKPGSDIQMTQSPSSLSASVGDRVTITCRASQSISSYLNWYQQKPGKAPKLLIYAASSLQSGVPSRFSGSGSGTDFTLTISSLQPEDFATYYCQQVYSTPFTFGQGTKLEIKEPKSSDKTHTCPPCPAPPVAGPSVFLFPPKPKDTLMISRTPEVTCVVVDVKHEDPEVKFNWYVDGVEVHNAKTKPREEQYNSTYRVVSVLTVLHQDWLNGKEYKCKVSNKALPAPIEKTISKAKGQPREPQVYTLPPSREQMTKNQVKLTCLVKGFYPSDIAVEWESNGQPENNYKTTPPVLDSDGSFFLYSKLTVDKSRWQQGNVFSCSVMHEALHNHYTQKSLSLSPGK

SEQ ID NO: 1334 - protein, 216 aa, synthetic construct; identical to SEQ ID NO: 1051
  REGION 1..216: note = Description of Artificial Sequence: Synthetic polypeptide
  REGION 1..216: note = XENP37560 Chain 3 - 2G4[PD-L1]_L1

SEQ ID NO: 1335 - protein, 447 aa, synthetic construct; identical to SEQ ID NO: 1052
  REGION 1..447: note = Description of Artificial Sequence: Synthetic polypeptide
  REGION 1..447: note = XENP37561 Chain 1 - 2G4[PD-L1]_H1_IgG1_pI(-)_Isosteric_A_/PVA_/S 267K/L368D/K370S

SEQ ID NO: 1336 - protein, 479 aa, synthetic construct
  REGION 1..479: note = Description of Artificial Sequence: Synthetic polypeptide
  REGION 1..479: note = XENP37561 Chain 2 - 1A7[CD28]_L1.71_H1.14_scFv(GKPGS)4_Fc(216)_I gG1_C220S/PVA_/S267K/S364K/E357Q
DIQMTQSPSSLSASVGDRVTITCRASQSISSYLNWYQQKPGKAPKLLIYAASSLQSGVPSRFSGSGSGTDFTLTISSLQPEDFATYYCQQVYSTPFTFGQGTKLEIKGKPGSGKPGSGKPGSGKPGSEVQLLESGGGLVQPGGSLRLSCAASGFTFSSYYMSWVRQAPGKGLEWVSTISESGDSTYYADSVKGRFTISRDNSKNTLYLQMNSLRAEDTAVYYCAKSGPGLRQVGFDYWGQGTLVTVSSEPKSSDKTHTCPPCPAPPVAGPSVFLFPPKPKDTLMISRTPEVTCVVVDVKHEDPEVKFNWYVDGVEVHNAKTKPREEQYNSTYRVVSVLTVLHQDWLNGKEYKCKVSNKALPAPIEKTISKAKGQPREPQVYTLPPSREQMTKNQVKLTCLVKGFYPSDIAVEWESNGQPENNYKTTPPVLDSDGSFFLYSKLTVDKSRWQQGNVFSCSVMHEALHNHYTQKSLSLSPGK

SEQ ID NO: 1337 - protein, 216 aa, synthetic construct; identical to SEQ ID NO: 1051
  REGION 1..216: note = Description of Artificial Sequence: Synthetic polypeptide
  REGION 1..216: note = XENP37561 Chain 3 - 2G4[PD-L1]_L1

SEQ ID NO: 1338 - protein, 447 aa, synthetic construct
  REGION 1..447: note = Description of Artificial Sequence: Synthetic polypeptide
  REGION 1..447: note = XENP38482 Chain 1 - 2G4[PD-L1]_H1.1_IgG1_pI(-)_Isosteric_A_/PVA_ /S267K/L368D/K370S
EVQLLESGGGLVQPGGSLRLSCAASGFTFPSRDMSWVRQAPGKRLEWVSTISSGGSFTHYPDSVKGRFTISRDNSKNTLYLQMNSLRAEDTAVYYCVRRSGDWYFDVWGAGTTVTVSSASTKGPSVFPLAPSSKSTSGGTAALGCLVKDYFPEPVTVSWNSGALTSGVHTFPAVLQSSGLYSLSSVVTVPSSSLGTQTYICNVNHKPSDTKVDKKVEPKSCDKTHTCPPCPAPPVAGPSVFLFPPKPKDTLMISRTPEVTCVVVDVKHEDPEVKFNWYVDGVEVHNAKTKPREEEYNSTYRVVSVLTVLHQDWLNGKEYKCKVSNKALPAPIEKTISKAKGQPREPQVYTLPPSREEMTKNQVSLTCDVSGFYPSDIAVEWESDGQPENNYKTTPPVLDSDGSFFLYSKLTVDKSRWEQGDVFSCSVMHEALHNHYTQKSLSLSPGK

SEQ ID NO: 1339 - protein, 479 aa, synthetic construct; identical to SEQ ID NO: 1330
  REGION 1..479: note = Description of Artificial Sequence: Synthetic polypeptide
  REGION 1..479: note = XENP38482 Chain 2 - 1A7[CD28]_H1_L1.71_scFv(GKPGS)4_Fc(216)_IgG1 _C220S/PVA_/S267K/S364K/E357Q

SEQ ID NO: 1340 - protein, 216 aa, synthetic construct
  REGION 1..216: note = Description of Artificial Sequence: Synthetic polypeptide
  REGION 1..216: note = XENP38482 Chain 3 - 2G4[PD-L1]_L1.1 Light Chain
EIVLTQSPGTLSLSPGERATLSCRVSSSISSSNLHWYQQKPGQSPRPLIYGTSNLASGVPVRFSGSGSGTDYTLTISRLEPEDFAVYYCQQWWSYPLYTFGGGTKVEIKRTVAAPSVFIFPPSDEQLKSGTASVVCLLNNFYPREAKVQWKVDNALQSGNSQESVTEQDSKDSTYSLSSTLTLSKADYEKHKVYACEVTHQGLSSPVTKSFNRGEC

SEQ ID NO: 1341 - protein, 447 aa, synthetic construct
  REGION 1..447: note = Description of Artificial Sequence: Synthetic polypeptide
  REGION 1..447: note = XENP38490 Chain 1 - 2G4[PD-L1]_H1.9_IgG1_pI(-)_Isosteric_A_/PVA_ /S267K/L368D/K370S
EVQLLESGGGLVQPGGSLRLSCAASGFTFSFRDMSWVRQAPGKRLEWVSTISSGGSFTHYPDSVKGRFTISRDNSKNTLYLQMNSLRAEDTAVYYCVRRSGDWYFDVWGAGTTVTVSSASTKGPSVFPLAPSSKSTSGGTAALGCLVKDYFPEPVTVSWNSGALTSGVHTFPAVLQSSGLYSLSSVVTVPSSSLGTQTYICNVNHKPSDTKVDKKVEPKSCDKTHTCPPCPAPPVAGPSVFLFPPKPKDTLMISRTPEVTCVVVDVKHEDPEVKFNWYVDGVEVHNAKTKPREEEYNSTYRVVSVLTVLHQDWLNGKEYKCKVSNKALPAPIEKTISKAKGQPREPQVYTLPPSREEMTKNQVSLTCDVSGFYPSDIAVEWESDGQPENNYKTTPPVLDSDGSFFLYSKLTVDKSRWEQGDVFSCSVMHEALHNHYTQKSLSLSPGK

SEQ ID NO: 1342 - protein, 479 aa, synthetic construct; identical to SEQ ID NO: 1330
  REGION 1..479: note = Description of Artificial Sequence: Synthetic polypeptide
  REGION 1..479: note = XENP38490 Chain 2 - 1A7[CD28]_H1_L1.71_scFv(GKPGS)4_Fc(216)_IgG1 _C220S/PVA_/S267K/S364K/E357Q

SEQ ID NO: 1343 - protein, 216 aa, synthetic construct; identical to SEQ ID NO: 1051
  REGION 1..216: note = Description of Artificial Sequence: Synthetic polypeptide
  REGION 1..216: note = XENP38490 Chain 3 - 2G4[PD-L1]_L1

SEQ ID NO: 1344 - protein, 447 aa, synthetic construct
  REGION 1..447: note = Description of Artificial Sequence: Synthetic polypeptide
  REGION 1..447: note = XENP38494 Chain 1 - 2G4[PD-L1]_H1.10_IgG1_pI(-)_Isosteric_A_/PVA _/S267K/L368D/K370S
EVQLLESGGGLVQPGGSLRLSCAASGFTFSWYDMSWVRQAPGKRLEWVSTISSGGSFTHYPDSVKGRFTISRDNSKNTLYLQMNSLRAEDTAVYYCVRRSGDWYFDVWGAGTTVTVSSASTKGPSVFPLAPSSKSTSGGTAALGCLVKDYFPEPVTVSWNSGALTSGVHTFPAVLQSSGLYSLSSVVTVPSSSLGTQTYICNVNHKPSDTKVDKKVEPKSCDKTHTCPPCPAPPVAGPSVFLFPPKPKDTLMISRTPEVTCVVVDVKHEDPEVKFNWYVDGVEVHNAKTKPREEEYNSTYRVVSVLTVLHQDWLNGKEYKCKVSNKALPAPIEKTISKAKGQPREPQVYTLPPSREEMTKNQVSLTCDVSGFYPSDIAVEWESDGQPENNYKTTPPVLDSDGSFFLYSKLTVDKSRWEQGDVFSCSVMHEALHNHYTQKSLSLSPGK

SEQ ID NO: 1345 - protein, 479 aa, synthetic construct; identical to SEQ ID NO: 1330
  REGION 1..479: note = Description of Artificial Sequence: Synthetic polypeptide
  REGION 1..479: note = XENP38494 Chain 2 - 1A7[CD28]_H1_L1.71_scFv(GKPGS)4_Fc(216)_IgG1 _C220S/PVA_/S267K/S364K/E357Q

SEQ ID NO: 1346 - protein, 216 aa, synthetic construct
  REGION 1..216: note = Description of Artificial Sequence: Synthetic polypeptide
  REGION 1..216: note = XENP38494 Chain 3 - 2G4[PD-L1]_L1.23 Light Chain
EIVLTQSPGTLSLSPGERATLSCRVSLSIQSSNLHWYQQKPGQSPRPLIYGTNLLASGVPVRFSGSGSGTDYTLTISRLEPEDFAVYYCQQWSSYPLYTFGGGTKVEIKRTVAAPSVFIFPPSDEQLKSGTASVVCLLNNFYPREAKVQWKVDNALQSGNSQESVTEQDSKDSTYSLSSTLTLSKADYEKHKVYACEVTHQGLSSPVTKSFNRGEC

SEQ ID NO: 1347 - protein, 447 aa, synthetic construct; identical to SEQ ID NO: 1052
  REGION 1..447: note = Description of Artificial Sequence: Synthetic polypeptide
  REGION 1..447: note = XENP38502 Chain 1 - 2G4[PD-L1]_H1_IgG1_pI(-)_Isosteric_A_/PVA_/S 267K/L368D/K370S

SEQ ID NO: 1348 - protein, 479 aa, synthetic construct; identical to SEQ ID NO: 1330
  REGION 1..479: note = Description of Artificial Sequence: Synthetic polypeptide
  REGION 1..479: note = XENP38502 Chain 2 - 1A7[CD28]_H1_L1.71_scFv(GKPGS)4_Fc(216)_IgG1 _C220S/PVA_/S267K/S364K/E357Q

SEQ ID NO: 1349 - protein, 216 aa, synthetic construct
  REGION 1..216: note = Description of Artificial Sequence: Synthetic polypeptide
  REGION 1..216: note = XENP38502 Chain 3 - 2G4[PD-L1]_L1.25 Light Chain
EIVLTQSPGTLSLSPGERATLSCRVSSSIQPSNLHWYQQKPGQSPRPLIYGTSNLASGVPVRFSGSGSGTDYTLTISRLEPEDFAVYYCQQWSSYPLYTFGGGTKVEIKRTVAAPSVFIFPPSDEQLKSGTASVVCLLNNFYPREAKVQWKVDNALQSGNSQESVTEQDSKDSTYSLSSTLTLSKADYEKHKVYACEVTHQGLSSPVTKSFNRGEC

SEQ ID NO: 1350 - protein, 447 aa, synthetic construct
  REGION 1..447: note = Description of Artificial Sequence: Synthetic polypeptide
  REGION 1..447: note = XENP38506 Chain 1 - 2G4[PD-L1]_H1.8_IgG1_pI(-)_Isosteric_A_/PVA_ /S267K/L368D/K370S
EVQLLESGGGLVQPGGSLRLSCAASGFTFSSSDMSWVRQAPGKRLEWVSTISSGGSFTHYPDSVKGRFTISRDNSKNTLYLQMNSLRAEDTAVYYCVRRSGDWYFDVWGAGTTVTVSSASTKGPSVFPLAPSSKSTSGGTAALGCLVKDYFPEPVTVSWNSGALTSGVHTFPAVLQSSGLYSLSSVVTVPSSSLGTQTYICNVNHKPSDTKVDKKVEPKSCDKTHTCPPCPAPPVAGPSVFLFPPKPKDTLMISRTPEVTCVVVDVKHEDPEVKFNWYVDGVEVHNAKTKPREEEYNSTYRVVSVLTVLHQDWLNGKEYKCKVSNKALPAPIEKTISKAKGQPREPQVYTLPPSREEMTKNQVSLTCDVSGFYPSDIAVEWESDGQPENNYKTTPPVLDSDGSFFLYSKLTVDKSRWEQGDVFSCSVMHEALHNHYTQKSLSLSPGK

SEQ ID NO: 1351 - protein, 479 aa, synthetic construct; identical to SEQ ID NO: 1330
  REGION 1..479: note = Description of Artificial Sequence: Synthetic polypeptide
  REGION 1..479: note = XENP38506 Chain 2 - 1A7[CD28]_H1_L1.71_scFv(GKPGS)4_Fc(216)_IgG1 _C220S/PVA_/S267K/S364K/E357Q

SEQ ID NO: 1352 - protein, 216 aa, synthetic construct
  REGION 1..216: note = Description of Artificial Sequence: Synthetic polypeptide
  REGION 1..216: note = XENP38506 Chain 3 - 2G4[PD-L1]_L1.26 Light Chain
EIVLTQSPGTLSLSPGERATLSCRASSSIQDSNLHWYQQKPGQSPRLLIYGTSNLRSGVPVRFSGSGSGTDYTLTISRLEPEDFAVYYCQQWSSYPLYTFGGGTKVEIKRTVAAPSVFIFPPSDEQLKSGTASVVCLLNNFYPREAKVQWKVDNALQSGNSQESVTEQDSKDSTYSLSSTLTLSKADYEKHKVYACEVTHQGLSSPVTKSFNRGEC

SEQ ID NO: 1353 - protein, 447 aa, synthetic construct; identical to SEQ ID NO: 1052
  REGION 1..447: note = Description of Artificial Sequence: Synthetic polypeptide
  REGION 1..447: note = XENP38510 Chain 1 - 2G4[PD-L1]_H1_IgG1_pI(-)_Isosteric_A_/PVA_/S 267K/L368D/K370S

SEQ ID NO: 1354 - protein, 479 aa, synthetic construct; identical to SEQ ID NO: 1330
  REGION 1..479: note = Description of Artificial Sequence: Synthetic polypeptide
  REGION 1..479: note = XENP38510 Chain 2 - 1A7[CD28]_H1_L1.71_scFv(GKPGS)4_Fc(216)_IgG1 _C220S/PVA_/S267K/S364K/E357Q

SEQ ID NO: 1355 - protein, 216 aa, synthetic construct
  REGION 1..216: note = Description of Artificial Sequence: Synthetic polypeptide
  REGION 1..216: note = XENP38510 Chain 3 - 2G4[PD-L1]_L1.27 Light Chain
EIVLTQSPGTLSLSPGERATLSCRVSSSIQGSNLHWYQQKPGQSPRPLIYGTSNLASGVPVRFSGSGSGTDYTLTISRLEPEDFAVYYCQQWSSYPLYTFGGGTKVEIKRTVAAPSVFIFPPSDEQLKSGTASVVCLLNNFYPREAKVQWKVDNALQSGNSQESVTEQDSKDSTYSLSSTLTLSKADYEKHKVYACEVTHQGLSSPVTKSFNRGEC

SEQ ID NO: 1356 - protein, 447 aa, synthetic construct
  REGION 1..447: note = Description of Artificial Sequence: Synthetic polypeptide
  REGION 1..447: note = XENP38512 Chain 1 - 2G4[PD-L1]_H1.12_IgG1_pI(-)_Isosteric_A_/PVA _/S267K/L368D/K370S
EVQLLESGGGLVQPGGSLRLSCAASGFTFSVYDMSWVRQAPGKRLEWVSTISSGGSFTHYPDSVKGRFTISRDNSKNTLYLQMNSLRAEDTAVYYCVRRSLDWYFDVWGAGTTVTVSSASTKGPSVFPLAPSSKSTSGGTAALGCLVKDYFPEPVTVSWNSGALTSGVHTFPAVLQSSGLYSLSSVVTVPSSSLGTQTYICNVNHKPSDTKVDKKVEPKSCDKTHTCPPCPAPPVAGPSVFLFPPKPKDTLMISRTPEVTCVVVDVKHEDPEVKFNWYVDGVEVHNAKTKPREEEYNSTYRVVSVLTVLHQDWLNGKEYKCKVSNKALPAPIEKTISKAKGQPREPQVYTLPPSREEMTKNQVSLTCDVSGFYPSDIAVEWESDGQPENNYKTTPPVLDSDGSFFLYSKLTVDKSRWEQGDVFSCSVMHEALHNHYTQKSLSLSPGK

SEQ ID NO: 1357 - protein, 479 aa, synthetic construct; identical to SEQ ID NO: 1321
  REGION 1..479: note = Description of Artificial Sequence: Synthetic polypeptide
  REGION 1..479: note = XENP38512 Chain 2 - 1A7[CD28]_H1.14_L1.71_scFv(GKPGS)4_Fc(216)_I gG1_C220S/PVA_/S267K/S364K/E357Q

SEQ ID NO: 1358 - protein, 216 aa, synthetic construct
  REGION 1..216: note = Description of Artificial Sequence: Synthetic polypeptide
  REGION 1..216: note = XENP38512 Chain 3 - 2G4[PD-L1]_L1.24 Light Chain
EIVLTQSPGTLSLSPGERATLSCRVSSSIQSTNLHWYQQKPGQSPRPLIYGTSVLATGVPVRFSGSGSGTDYTLTISRLEPEDFAVYYCQQWSSYPLYTFGGGTKVEIKRTVAAPSVFIFPPSDEQLKSGTASVVCLLNNFYPREAKVQWKVDNALQSGNSQESVTEQDSKDSTYSLSSTLTLSKADYEKHKVYACEVTHQGLSSPVTKSFNRGEC

SEQ ID NO: 1359 - protein, 447 aa, synthetic construct; identical to SEQ ID NO: 1356
  REGION 1..447: note = Description of Artificial Sequence: Synthetic polypeptide
  REGION 1..447: note = XENP38514 Chain 1 - 2G4[PD-L1]_H1.12_IgG1_pI(-)_Isosteric_A_/PVA _/S267K/L368D/K370S

SEQ ID NO: 1360 - protein, 479 aa, synthetic construct; identical to SEQ ID NO: 1330
  REGION 1..479: note = Description of Artificial Sequence: Synthetic polypeptide
  REGION 1..479: note = XENP38514 Chain 2 - 1A7[CD28]_H1_L1.71_scFv(GKPGS)4_Fc(216)_IgG1 _C220S/PVA_/S267K/S364K/E357Q

SEQ ID NO: 1361 - protein, 216 aa, synthetic construct; identical to SEQ ID NO: 1358
  REGION 1..216: note = Description of Artificial Sequence: Synthetic polypeptide
  REGION 1..216: note = XENP38514 Chain 3 - 2G4[PD-L1]_L1.24

SEQ ID NO: 1362 - protein, 447 aa, synthetic construct
  REGION 1..447: note = Description of Artificial Sequence: Synthetic polypeptide
  REGION 1..447: note = XENP38518 Chain 1 - 2G4[PD-L1]_H1.14_IgG1_pI(-)_Isosteric_A_/PVA _/S267K/L368D/K370S
EVQLLESGGGLVQPGGSLRLSCAASGFTFSSSDMSWVRQAPGKRLEWVSTISSGGSFTHYPDSVKGRFTISRDNSKNTLYLQMNSLRAEDTAVYYCVRRSLDWYFDVWGAGTTVTVSSASTKGPSVFPLAPSSKSTSGGTAALGCLVKDYFPEPVTVSWNSGALTSGVHTFPAVLQSSGLYSLSSVVTVPSSSLGTQTYICNVNHKPSDTKVDKKVEPKSCDKTHTCPPCPAPPVAGPSVFLFPPKPKDTLMISRTPEVTCVVVDVKHEDPEVKFNWYVDGVEVHNAKTKPREEEYNSTYRVVSVLTVLHQDWLNGKEYKCKVSNKALPAPIEKTISKAKGQPREPQVYTLPPSREEMTKNQVSLTCDVSGFYPSDIAVEWESDGQPENNYKTTPPVLDSDGSFFLYSKLTVDKSRWEQGDVFSCSVMHEALHNHYTQKSLSLSPGK

SEQ ID NO: 1363 - protein, 479 aa, synthetic construct; identical to SEQ ID NO: 1330
  REGION 1..479: note = Description of Artificial Sequence: Synthetic polypeptide
  REGION 1..479: note = XENP38518 Chain 2 - 1A7[CD28]_H1_L1.71_scFv(GKPGS)4_Fc(216)_IgG1 _C220S/PVA_/S267K/S364K/E357Q

SEQ ID NO: 1364 - protein, 216 aa, synthetic construct; identical to SEQ ID NO: 1352
  REGION 1..216: note = Description of Artificial Sequence: Synthetic polypeptide
  REGION 1..216: note = XENP38518 Chain 3 - 2G4[PD-L1]_L1.26 Light Chain

SEQ ID NO: 1365 - protein, 447 aa, synthetic construct
  REGION 1..447: note = Description of Artificial Sequence: Synthetic polypeptide
  REGION 1..447: note = XENP38522 Chain 1 - 2G4[PD-L1]_H1.59_IgG1_pI(-)_Isosteric_A_/PVA _/S267K/L368D/K370S
EVQLLESGGGLVQPGGSLRLSCAASGFTFHSRDMSWVRQAPGKGLEWVSTISSGGRFTHYPDSVKGRFTISRDNSKNTLYLQMNSLRAEDTAVYYCARRSGDWYFDVWGAGTTVTVSSASTKGPSVFPLAPSSKSTSGGTAALGCLVKDYFPEPVTVSWNSGALTSGVHTFPAVLQSSGLYSLSSVVTVPSSSLGTQTYICNVNHKPSDTKVDKKVEPKSCDKTHTCPPCPAPPVAGPSVFLFPPKPKDTLMISRTPEVTCVVVDVKHEDPEVKFNWYVDGVEVHNAKTKPREEEYNSTYRVVSVLTVLHQDWLNGKEYKCKVSNKALPAPIEKTISKAKGQPREPQVYTLPPSREEMTKNQVSLTCDVSGFYPSDIAVEWESDGQPENNYKTTPPVLDSDGSFFLYSKLTVDKSRWEQGDVFSCSVMHEALHNHYTQKSLSLSPGK

SEQ ID NO: 1366 - protein, 479 aa, synthetic construct; identical to SEQ ID NO: 1330
  REGION 1..479: note = Description of Artificial Sequence: Synthetic polypeptide
  REGION 1..479: note = XENP38522 Chain 2 - 1A7[CD28]_H1_L1.71_scFv(GKPGS)4_Fc(216)_IgG1 _C220S/PVA_/S267K/S364K/E357Q

SEQ ID NO: 1367 - protein, 216 aa, synthetic construct
  REGION 1..216: note = Description of Artificial Sequence: Synthetic polypeptide
  REGION 1..216: note = XENP38522 Chain 3 - 2G4[PD-L1]_L1.60 Light Chain
EIVLTQSPGTLSLSPGERATLSCRASSSISSSNLHWYQQKPGQSPRLLIYGTSNLASGVPVRFSGSGSGTDYTLTISRLEPEDFAVYYCQQWSSYPLWTFGGGTKVEIKRTVAAPSVFIFPPSDEQLKSGTASVVCLLNNFYPREAKVQWKVDNALQSGNSQESVTEQDSKDSTYSLSSTLTLSKADYEKHKVYACEVTHQGLSSPVTKSFNRGEC

SEQ ID NO: 1368 - protein, 447 aa, synthetic construct
  REGION 1..447: note = Description of Artificial Sequence: Synthetic polypeptide
  REGION 1..447: note = XENP38526 Chain 1 - 2G4[PD-L1]_H1.60_IgG1_pI(-)_Isosteric_A_/PVA _/S267K/L368D/K370S
EVQLLESGGGLVQPGGSLRLSCAASGFTFSSSDMSWVRQAPGKGLEWVSTISSGGSFTHYPDSVKGRFTISRDNSKNTLYLQMNSLRAEDTAVYYCARRSLDWYFDVWGAGTTVTVSSASTKGPSVFPLAPSSKSTSGGTAALGCLVKDYFPEPVTVSWNSGALTSGVHTFPAVLQSSGLYSLSSVVTVPSSSLGTQTYICNVNHKPSDTKVDKKVEPKSCDKTHTCPPCPAPPVAGPSVFLFPPKPKDTLMISRTPEVTCVVVDVKHEDPEVKFNWYVDGVEVHNAKTKPREEEYNSTYRVVSVLTVLHQDWLNGKEYKCKVSNKALPAPIEKTISKAKGQPREPQVYTLPPSREEMTKNQVSLTCDVSGFYPSDIAVEWESDGQPENNYKTTPPVLDSDGSFFLYSKLTVDKSRWEQGDVFSCSVMHEALHNHYTQKSLSLSPGK

SEQ ID NO: 1369 - protein, 479 aa, synthetic construct; identical to SEQ ID NO: 1330
  REGION 1..479: note = Description of Artificial Sequence: Synthetic polypeptide
  REGION 1..479: note = XENP38526 Chain 2 - 1A7[CD28]_H1_L1.71_scFv(GKPGS)4_Fc(216)_IgG1 _C220S/PVA_/S267K/S364K/E357Q

SEQ ID NO: 1370 - protein, 216 aa, synthetic construct; identical to SEQ ID NO: 1367
  REGION 1..216: note = Description of Artificial Sequence: Synthetic polypeptide
  REGION 1..216: note = XENP38526 Chain 3 - 2G4[PD-L1]_L1.60 Light Chain

SEQ ID NO: 1371 - protein, 447 aa, synthetic construct; identical to SEQ ID NO: 1052
  REGION 1..447: note = Description of Artificial Sequence: Synthetic polypeptide
  REGION 1..447: note = XENP38580 Chain 1 - 2G4[PD-L1]_H1_IgG1_pI(-)_Isosteric_A_/PVA_/S 267K/L368D/K370S

SEQ ID NO: 1372 - protein, 479 aa, synthetic construct; identical to SEQ ID NO: 1330
  REGION 1..479: note = Description of Artificial Sequence: Synthetic polypeptide
  REGION 1..479: note = XENP38580 Chain 2 - 1A7[CD28]_H1_L1.71_scFv(GKPGS)4_Fc(216)_IgG1 _C220S/PVA_/S267K/S364K/E357Q

SEQ ID NO: 1373 - protein, 216 aa, synthetic construct
  REGION 1..216: note = Description of Artificial Sequence: Synthetic polypeptide
  REGION 1..216: note = XENP38580 Chain 3 - 2G4[PD-L1]_L1.29 Light Chain
EIVLTQSPGTLSLSPGERATLSCRVSSRIVLSNLHWYQQKPGQSPRPLIYGTSVLATGVPVRFSGSGSGTDYTLTISRLEPEDFAVYYCQQWSSYPLWTFGGGTKVEIKRTVAAPSVFIFPPSDEQLKSGTASVVCLLNNFYPREAKVQWKVDNALQSGNSQESVTEQDSKDSTYSLSSTLTLSKADYEKHKVYACEVTHQGLSSPVTKSFNRGEC

SEQ ID NO: 1374 - protein, 447 aa, synthetic construct
  REGION 1..447: note = Description of Artificial Sequence: Synthetic polypeptide
  REGION 1..447: note = XENP38584 Chain 1 - 2G4[PD-L1]_H1.4_IgG1_pI(-)_Isosteric_A_/PVA_ /S267K/L368D/K370S
EVQLLESGGGLVQPGGSLRLSCAASGFTFSSYDMSWVRQAPGKRLEWVSTISSGGSFTHYPDSVKGRFTISRDNSKNTLYLQMNSLRAEDTAVYYCARRSLDWYFDVWGAGTTVTVSSASTKGPSVFPLAPSSKSTSGGTAALGCLVKDYFPEPVTVSWNSGALTSGVHTFPAVLQSSGLYSLSSVVTVPSSSLGTQTYICNVNHKPSDTKVDKKVEPKSCDKTHTCPPCPAPPVAGPSVFLFPPKPKDTLMISRTPEVTCVVVDVKHEDPEVKFNWYVDGVEVHNAKTKPREEEYNSTYRVVSVLTVLHQDWLNGKEYKCKVSNKALPAPIEKTISKAKGQPREPQVYTLPPSREEMTKNQVSLTCDVSGFYPSDIAVEWESDGQPENNYKTTPPVLDSDGSFFLYSKLTVDKSRWEQGDVFSCSVMHEALHNHYTQKSLSLSPGK

SEQ ID NO: 1375 - protein, 479 aa, synthetic construct; identical to SEQ ID NO: 1330
  REGION 1..479: note = Description of Artificial Sequence: Synthetic polypeptide
  REGION 1..479: note = XENP38584 Chain 2 - 1A7[CD28]_H1_L1.71_scFv(GKPGS)4_Fc(216)_IgG1 _C220S/PVA_/S267K/S364K/E357Q

SEQ ID NO: 1376 - protein, 216 aa, synthetic construct; identical to SEQ ID NO: 1346
  REGION 1..216: note = Description of Artificial Sequence: Synthetic polypeptide
  REGION 1..216: note = XENP38584 Chain 3 - 2G4[PD-L1]_L1.23

SEQ ID NO: 1377 - protein, 447 aa, synthetic construct; identical to SEQ ID NO: 1374
  REGION 1..447: note = Description of Artificial Sequence: Synthetic polypeptide
  REGION 1..447: note = XENP38585 Chain 1 - 2G4[PD-L1]_H1.4_IgG1_pI(-)_Isosteric_A_/PVA_ /S267K/L368D/K370S

SEQ ID NO: 1378 - protein, 479 aa, synthetic construct; identical to SEQ ID NO: 1330
  REGION 1..479: note = Description of Artificial Sequence: Synthetic polypeptide
  REGION 1..479: note = XENP38585 Chain 2 - 1A7[CD28]_H1_L1.71_scFv(GKPGS)4_Fc(216)_IgG1 _C220S/PVA_/S267K/S364K/E357Q

SEQ ID NO: 1379 - protein, 216 aa, synthetic construct; identical to SEQ ID NO: 1358
  REGION 1..216: note = Description of Artificial Sequence: Synthetic polypeptide
  REGION 1..216: note = XENP38585 Chain 3 - 2G4[PD-L1]_L1.24

SEQ ID NO: 1380 - protein, 447 aa, synthetic construct
  REGION 1..447: note = Description of Artificial Sequence: Synthetic polypeptide
  REGION 1..447: note = XENP38586 Chain 1 - 2G4[PD-L1]_H1.61_IgG1_pI(-)_Isosteric_A_/PVA _/S267K/L368D/K370S
EVQLLESGGGLVQPGGSLRLSCAASGFTFSSYDMSWVRQAPGKGLEWVSTISSGGSFTHYPDSVKGRFTISRDNSKNTLYLQMNSLRAEDTAVYYCARRSLDWYFDVWGAGTTVTVSSASTKGPSVFPLAPSSKSTSGGTAALGCLVKDYFPEPVTVSWNSGALTSGVHTFPAVLQSSGLYSLSSVVTVPSSSLGTQTYICNVNHKPSDTKVDKKVEPKSCDKTHTCPPCPAPPVAGPSVFLFPPKPKDTLMISRTPEVTCVVVDVKHEDPEVKFNWYVDGVEVHNAKTKPREEEYNSTYRVVSVLTVLHQDWLNGKEYKCKVSNKALPAPIEKTISKAKGQPREPQVYTLPPSREEMTKNQVSLTCDVSGFYPSDIAVEWESDGQPENNYKTTPPVLDSDGSFFLYSKLTVDKSRWEQGDVFSCSVMHEALHNHYTQKSLSLSPGK

SEQ ID NO: 1381 - protein, 479 aa, synthetic construct; identical to SEQ ID NO: 1330
  REGION 1..479: note = Description of Artificial Sequence: Synthetic polypeptide
  REGION 1..479: note = XENP38586 Chain 2 - 1A7[CD28]_H1_L1.71_scFv(GKPGS)4_Fc(216)_IgG1 _C220S/PVA_/S267K/S364K/E357Q

SEQ ID NO: 1382 - protein, 216 aa, synthetic construct
  REGION 1..216: note = Description of Artificial Sequence: Synthetic polypeptide
  REGION 1..216: note = XENP38586 Chain 3 - 2G4[PD-L1]_L1.61 Light Chain
EIVLTQSPGTLSLSPGERATLSCRASLSIQSSNLHWYQQKPGQSPRLLIYGTNLLASGVPVRFSGSGSGTDYTLTISRLEPEDFAVYYCQQWSSYPLYTFGGGTKVEIKRTVAAPSVFIFPPSDEQLKSGTASVVCLLNNFYPREAKVQWKVDNALQSGNSQESVTEQDSKDSTYSLSSTLTLSKADYEKHKVYACEVTHQGLSSPVTKSFNRGEC

SEQ ID NO: 1383 - protein, 447 aa, synthetic construct; identical to SEQ ID NO: 1380
  REGION 1..447: note = Description of Artificial Sequence: Synthetic polypeptide
  REGION 1..447: note = XENP38587 Chain 1 - 2G4[PD-L1]_H1.61_IgG1_pI(-)_Isosteric_A_/PVA _/S267K/L368D/K370S

SEQ ID NO: 1384 - protein, 479 aa, synthetic construct; identical to SEQ ID NO: 1330
  REGION 1..479: note = Description of Artificial Sequence: Synthetic polypeptide
  REGION 1..479: note = XENP38587 Chain 2 - 1A7[CD28]_H1_L1.71_scFv(GKPGS)4_Fc(216)_IgG1 _C220S/PVA_/S267K/S364K/E357Q

SEQ ID NO: 1385 - protein, 216 aa, synthetic construct
  REGION 1..216: note = Description of Artificial Sequence: Synthetic polypeptide
  REGION 1..216: note = XENP38587 Chain 3 - 2G4[PD-L1]_L1.62 Light Chain
EIVLTQSPGTLSLSPGERATLSCRASSSIQSTNLHWYQQKPGQSPRLLIYGTSVLATGVPVRFSGSGSGTDYTLTISRLEPEDFAVYYCQQWSSYPLYTFGGGTKVEIKRTVAAPSVFIFPPSDEQLKSGTASVVCLLNNFYPREAKVQWKVDNALQSGNSQESVTEQDSKDSTYSLSSTLTLSKADYEKHKVYACEVTHQGLSSPVTKSFNRGEC

SEQ ID NO: 1386 - protein, 447 aa, synthetic construct
  REGION 1..447: note = Description of Artificial Sequence: Synthetic polypeptide
  REGION 1..447: note = XENP39153 Chain 1 - 2G4[PD-L1]_H1.62_IgG1_pI(-)_Isosteric_A_/PVA _/S267K/L368D/K370S
EVQLLESGGGLVQPGGSLRLSCAASGFTFSSYDMSWVRQAPGKGLEWVSTISSGGSFTHYPDSVKGRFTISRDNSKNTLYLQMNSLRAEDTAVYYCARRSGDWYFDVWGAGTTVTVSSASTKGPSVFPLAPSSKSTSGGTAALGCLVKDYFPEPVTVSWNSGALTSGVHTFPAVLQSSGLYSLSSVVTVPSSSLGTQTYICNVNHKPSDTKVDKKVEPKSCDKTHTCPPCPAPPVAGPSVFLFPPKPKDTLMISRTPEVTCVVVDVKHEDPEVKFNWYVDGVEVHNAKTKPREEEYNSTYRVVSVLTVLHQDWLNGKEYKCKVSNKALPAPIEKTISKAKGQPREPQVYTLPPSREEMTKNQVSLTCDVSGFYPSDIAVEWESDGQPENNYKTTPPVLDSDGSFFLYSKLTVDKSRWEQGDVFSCSVMHEALHNHYTQKSLSLSPGK

SEQ ID NO: 1387 - protein, 479 aa, synthetic construct; identical to SEQ ID NO: 1330
  REGION 1..479: note = Description of Artificial Sequence: Synthetic polypeptide
  REGION 1..479: note = XENP39153 Chain 2 - 1A7[CD28]_H1_L1.71_scFv(GKPGS)4_Fc(216)_IgG1 _C220S/PVA_/S267K/S364K/E357Q

SEQ ID NO: 1388 - protein, 216 aa, synthetic construct
  REGION 1..216: note = Description of Artificial Sequence: Synthetic polypeptide
  REGION 1..216: note = XENP39153 Chain 3 - 2G4[PD-L1]_L1.63 Light Chain
EIVLTQSPGTLSLSPGERATLSCRASSSISSSNLHWYQQKPGQSPRLLIYGTSNLASGVPVRFSGSGSGTDYTLTISRLEPEDFAVYYCQQWSSYPLYTFGGGTKVEIKRTVAAPSVFIFPPSDEQLKSGTASVVCLLNNFYPREAKVQWKVDNALQSGNSQESVTEQDSKDSTYSLSSTLTLSKADYEKHKVYACEVTHQGLSSPVTKSFNRGEC

SEQ ID NO: 1389 - protein, 447 aa, synthetic construct; identical to SEQ ID NO: 1374
  REGION 1..447: note = Description of Artificial Sequence: Synthetic polypeptide
  REGION 1..447: note = XENP39363 Chain 1 - 2G4[PD-L1]_H1.4_IgG1_pI(-)_Isosteric_A_/PVA_ /S267K/L368D/K370S

SEQ ID NO: 1390 - protein, 479 aa, synthetic construct; identical to SEQ ID NO: 1321
  REGION 1..479: note = Description of Artificial Sequence: Synthetic polypeptide
  REGION 1..479: note = XENP39363 Chain 2 - 1A7[CD28]_H1.14_L1.71_scFv(GKPGS)4_Fc(216)_I gG1_C220S/PVA_/S267K/S364K/E357Q

SEQ ID NO: 1391 - protein, 216 aa, synthetic construct; identical to SEQ ID NO: 1346
  REGION 1..216: note = Description of Artificial Sequence: Synthetic polypeptide
  REGION 1..216: note = XENP39363 Chain 3 - 2G4[PD-L1]_L1.23

SEQ ID NO: 1392 - protein, 447 aa, synthetic construct; identical to SEQ ID NO: 1374
  REGION 1..447: note = Description of Artificial Sequence: Synthetic polypeptide
  REGION 1..447: note = XENP39364 Chain 1 - 2G4[PD-L1]_H1.4_IgG1_pI(-)_Isosteric_A_/PVA_ /S267K/L368D/K370S

SEQ ID NO: 1393 - protein, 479 aa, synthetic construct; identical to SEQ ID NO: 1333
  REGION 1..479: note = Description of Artificial Sequence: Synthetic polypeptide
  REGION 1..479: note = XENP39364 Chain 2 - 1A7[CD28]_H1.1_L1.71_scFv(GKPGS)4_Fc(216)_Ig G1_C220S/PVA_/S267K/S364K/E357Q

SEQ ID NO: 1394 - protein, 216 aa, synthetic construct; identical to SEQ ID NO: 1346
  REGION 1..216: note = Description of Artificial Sequence: Synthetic polypeptide
  REGION 1..216: note = XENP39364 Chain 3 - 2G4[PD-L1]_L1.23

SEQ ID NO: 1395 - protein, 447 aa, synthetic construct; identical to SEQ ID NO: 1374
  REGION 1..447: note = Description of Artificial Sequence: Synthetic polypeptide
  REGION 1..447: note = XENP39365 Chain 1 - 2G4[PD-L1]_H1.4_IgG1_pI(-)_Isosteric_A_/PVA_ /S267K/L368D/K370S

SEQ ID NO: 1396 - protein, 479 aa, synthetic construct; identical to SEQ ID NO: 1312
  REGION 1..479: note = Description of Artificial Sequence: Synthetic polypeptide
  REGION 1..479: note = XENP39365 Chain 2 - 1A7[CD28]_H1.14_L1_scFv(GKPGS)4_Fc(216)_IgG1 _C220S/PVA_/S267K/S364K/E357Q

SEQ ID NO: 1397 - protein, 216 aa, synthetic construct; identical to SEQ ID NO: 1346
  REGION 1..216: note = Description of Artificial Sequence: Synthetic polypeptide
  REGION 1..216: note = XENP39365 Chain 3 - 2G4[PD-L1]_L1.23

SEQ ID NO: 1398 - protein, 447 aa, synthetic construct; identical to SEQ ID NO: 1374
  REGION 1..447: note = Description of Artificial Sequence: Synthetic polypeptide
  REGION 1..447: note = XENP39366 Chain 1 - 2G4[PD-L1]_H1.4_IgG1_pI(-)_Isosteric_A_/PVA_ /S267K/L368D/K370S

SEQ ID NO: 1399 - protein, 479 aa, synthetic construct; identical to SEQ ID NO: 1321
  REGION 1..479: note = Description of Artificial Sequence: Synthetic polypeptide
  REGION 1..479: note = XENP39366 Chain 2 - 1A7[CD28]_H1.14_L1.71_scFv(GKPGS)4_Fc(216)_I gG1_C220S/PVA_/S267K/S364K/E357Q

SEQ ID NO: 1400 - protein, 216 aa, synthetic construct; identical to SEQ ID NO: 1358
  REGION 1..216: note = Description of Artificial Sequence: Synthetic polypeptide
  REGION 1..216: note = XENP39366 Chain 3 - 2G4[PD-L1]_L1.24

SEQ ID NO: 1401 - protein, 447 aa, synthetic construct; identical to SEQ ID NO: 1374
  REGION 1..447: note = Description of Artificial Sequence: Synthetic polypeptide
  REGION 1..447: note = XENP39367 Chain 1 - 2G4[PD-L1]_H1.4_IgG1_pI(-)_Isosteric_A_/PVA_ /S267K/L368D/K370S

SEQ ID NO: 1402 - protein, 479 aa, synthetic construct; identical to SEQ ID NO: 1333
  REGION 1..479: note = Description of Artificial Sequence: Synthetic polypeptide
  REGION 1..479: note = XENP39367 Chain 2 - 1A7[CD28]_H1.1_L1.71_scFv(GKPGS)4_Fc(216)_Ig G1_C220S/PVA_/S267K/S364K/E357Q

SEQ ID NO: 1403 - protein, 216 aa, synthetic construct; identical to SEQ ID NO: 1358
  REGION 1..216: note = Description of Artificial Sequence: Synthetic polypeptide
  REGION 1..216: note = XENP39367 Chain 3 - 2G4[PD-L1]_L1.24

SEQ ID NO: 1404 - protein, 447 aa, synthetic construct; identical to SEQ ID NO: 1374
  REGION 1..447: note = Description of Artificial Sequence: Synthetic polypeptide
  REGION 1..447: note = XENP39368 Chain 1 - 2G4[PD-L1]_H1.4_IgG1_pI(-)_Isosteric_A_/PVA_ /S267K/L368D/K370S

SEQ ID NO: 1405 - protein, 479 aa, synthetic construct; identical to SEQ ID NO: 1312
  REGION 1..479: note = Description of Artificial Sequence: Synthetic polypeptide
  REGION 1..479: note = XENP39368 Chain 2 - 1A7[CD28]_H1.14_L1_scFv(GKPGS)4_Fc(216)_IgG1 _C220S/PVA_/S267K/S364K/E357Q

SEQ ID NO: 1406 - protein, 216 aa, synthetic construct; identical to SEQ ID NO: 1358
  REGION 1..216: note = Description of Artificial Sequence: Synthetic polypeptide
  REGION 1..216: note = XENP39368 Chain 3 - 2G4[PD-L1]_L1.24

SEQ ID NO: 1407 - protein, 447 aa, synthetic construct
  REGION 1..447: note = Description of Artificial Sequence: Synthetic polypeptide
  REGION 1..447: note = XENP39733 Chain 1 - 2G4[PD-L1]_H1.12_IgG1_pI(-)_Isosteric_A_/PVA _/S267K/L368D/K370S/M428L/N434S
EVQLLESGGGLVQPGGSLRLSCAASGFTFSVYDMSWVRQAPGKRLEWVSTISSGGSFTHYPDSVKGRFTISRDNSKNTLYLQMNSLRAEDTAVYYCVRRSLDWYFDVWGAGTTVTVSSASTKGPSVFPLAPSSKSTSGGTAALGCLVKDYFPEPVTVSWNSGALTSGVHTFPAVLQSSGLYSLSSVVTVPSSSLGTQTYICNVNHKPSDTKVDKKVEPKSCDKTHTCPPCPAPPVAGPSVFLFPPKPKDTLMISRTPEVTCVVVDVKHEDPEVKFNWYVDGVEVHNAKTKPREEEYNSTYRVVSVLTVLHQDWLNGKEYKCKVSNKALPAPIEKTISKAKGQPREPQVYTLPPSREEMTKNQVSLTCDVSGFYPSDIAVEWESDGQPENNYKTTPPVLDSDGSFFLYSKLTVDKSRWEQGDVFSCSVLHEALHSHYTQKSLSLSPGK

SEQ ID NO: 1408 - protein, 479 aa, synthetic construct; identical to SEQ ID NO: 1324
  REGION 1..479: note = Description of Artificial Sequence: Synthetic polypeptide
  REGION 1..479: note = XENP39733 Chain 2 - 1A7[CD28]_H1.14_L1.71_scFv(GKPGS)4_Fc(216)_I gG1_C220S/PVA_/S267K/S364K/E357Q/M428L/N434S

SEQ ID NO: 1409 - protein, 216 aa, synthetic construct; identical to SEQ ID NO: 1358
  REGION 1..216: note = Description of Artificial Sequence: Synthetic polypeptide
  REGION 1..216: note = XENP39733 Chain 3 - 2G4[PD-L1]_L1.24 Light Chain

SEQ ID NO: 1410 - protein, 447 aa, synthetic construct; identical to SEQ ID NO: 1356
  REGION 1..447: note = Description of Artificial Sequence: Synthetic polypeptide
  REGION 1..447: note = XENP40036 Chain 1 - 2G4[PD-L1]_H1.12_IgG1_pI(-)_Isosteric_A_/PVA _/S267K/L368D/K370S

SEQ ID NO: 1411 - protein, 479 aa, synthetic construct; identical to SEQ ID NO: 1321
  REGION 1..479: note = Description of Artificial Sequence: Synthetic polypeptide
  REGION 1..479: note = XENP40036 Chain 2 - 1A7[CD28]_H1.14_L1.71_scFv(GKPGS)4_Fc(216)_I gG1_C220S/PVA_/S267K/S364K/E357Q

SEQ ID NO: 1412 - protein, 216 aa, synthetic construct; identical to SEQ ID NO: 1358
  REGION 1..216: note = Description of Artificial Sequence: Synthetic polypeptide
  REGION 1..216: note = XENP40036 Chain 3 - 2G4[PD-L1]_L1.24 Light Chain

SEQ ID NO: 1413 - protein, 447 aa, synthetic construct; identical to SEQ ID NO: 1356
  REGION 1..447: note = Description of Artificial Sequence: Synthetic polypeptide
  REGION 1..447: note = XENP40403 Chain 1 - 2G4[PD-L1]_H1.12_IgG1_pI(-)_Isosteric_A_/PVA _/S267K/L368D/K370S

SEQ ID NO: 1414 - protein, 479 aa, synthetic construct; identical to SEQ ID NO: 1321
  REGION 1..479: note = Description of Artificial Sequence: Synthetic polypeptide
  REGION 1..479: note = XENP40403 Chain 2 - 1A7[CD28]_H1.14_L1.71_scFv(GKPGS)4_Fc(216)_I gG1_C220S/PVA_/S267K/S364K/E357Q

SEQ ID NO: 1415 - protein, 216 aa, synthetic construct
  REGION 1..216: note = Description of Artificial Sequence: Synthetic polypeptide
  REGION 1..216: note = XENP40403 Chain 3 - 2G4[PD-L1]_L1.66 Light Chain
EIVLTQSPGTLSLSPGERATLSCRVSSSIQSTNLHWYQQKPGQSPRPLIYGTSNLATGVPVRFSGSGSGTDYTLTISRLEPEDFAVYYCQQWSSYPLYTFGGGTKVEIKRTVAAPSVFIFPPSDEQLKSGTASVVCLLNNFYPREAKVQWKVDNALQSGNSQESVTEQDSKDSTYSLSSTLTLSKADYEKHKVYACEVTHQGLSSPVTKSFNRGEC

SEQ ID NO: 1416 - protein, 447 aa, synthetic construct; identical to SEQ ID NO: 1356
  REGION 1..447: note = Description of Artificial Sequence: Synthetic polypeptide
  REGION 1..447: note = XENP40405 Chain 1 - 2G4[PD-L1]_H1.12_IgG1_pI(-)_Isosteric_A_/PVA _/S267K/L368D/K370S

SEQ ID NO: 1417 - protein, 479 aa, synthetic construct; identical to SEQ ID NO: 1321
  REGION 1..479: note = Description of Artificial Sequence: Synthetic polypeptide
  REGION 1..479: note = XENP40405 Chain 2 - 1A7[CD28]_H1.14_L1.71_scFv(GKPGS)4_Fc(216)_I gG1_C220S/PVA_/S267K/S364K/E357Q

SEQ ID NO: 1418 - protein, 216 aa, synthetic construct
  REGION 1..216: note = Description of Artificial Sequence: Synthetic polypeptide
  REGION 1..216: note = XENP40405 Chain 3 - 2G4[PD-L1]_L1.68 Light Chain
EIVLTQSPGTLSLSPGERATLSCRVSSSIQSTNLHWYQQKPGQSPRPLIYGTSNLASGVPVRFSGSGSGTDYTLTISRLEPEDFAVYYCQQWSSYPLYTFGGGTKVEIKRTVAAPSVFIFPPSDEQLKSGTASVVCLLNNFYPREAKVQWKVDNALQSGNSQESVTEQDSKDSTYSLSSTLTLSKADYEKHKVYACEVTHQGLSSPVTKSFNRGEC

SEQ ID NO: 1419 - protein, 447 aa, synthetic construct; identical to SEQ ID NO: 1356
  REGION 1..447: note = Description of Artificial Sequence: Synthetic polypeptide
  REGION 1..447: note = XENP40409 Chain 1 - 2G4[PD-L1]_H1.12_IgG1_pI(-)_Isosteric_A_/PVA _/S267K/L368D/K370S

SEQ ID NO: 1420 - protein, 479 aa, synthetic construct; identical to SEQ ID NO: 1321
  REGION 1..479: note = Description of Artificial Sequence: Synthetic polypeptide
  REGION 1..479: note = XENP40409 Chain 2 - 1A7[CD28]_H1.14_L1.71_scFv(GKPGS)4_Fc(216)_I gG1_C220S/PVA_/S267K/S364K/E357Q

SEQ ID NO: 1421 - protein, 216 aa, synthetic construct
  REGION 1..216: note = Description of Artificial Sequence: Synthetic polypeptide
  REGION 1..216: note = XENP40409 Chain 3 - 2G4[PD-L1]_L1.14 Light Chain
EIVLTQSPGTLSLSPGERATLSCRVSSSIQSSNLHWYQQKPGQSPRPLIYGTSNLASGVPVRFSGSGSGTDYTLTISRLEPEDFAVYYCQQWSSYPLYTFGGGTKVEIKRTVAAPSVFIFPPSDEQLKSGTASVVCLLNNFYPREAKVQWKVDNALQSGNSQESVTEQDSKDSTYSLSSTLTLSKADYEKHKVYACEVTHQGLSSPVTKSFNRGEC

SEQ ID NO: 1422 - protein, 447 aa, synthetic construct; identical to SEQ ID NO: 1407
  REGION 1..447: note = Description of Artificial Sequence: Synthetic polypeptide
  REGION 1..447: note = XENP40706 Chain 1 - 2G4[PD-L1]_H1.12_IgG1_pI(-)_Isosteric_A_/PVA _/S267K/L368D/K370S/M428L/N434S

SEQ ID NO: 1423 - protein, 479 aa, synthetic construct; identical to SEQ ID NO: 1324
  REGION 1..479: note = Description of Artificial Sequence: Synthetic polypeptide
  REGION 1..479: note = XENP40706 Chain 2 - 1A7[CD28]_H1.14_L1.71_scFv(GKPGS)4_Fc(216)_I gG1_C220S/PVA_/S267K/S364K/E357Q/M428L/N434S

SEQ ID NO: 1424 - protein, 216 aa, synthetic construct; identical to SEQ ID NO: 1421
  REGION 1..216: note = Description of Artificial Sequence: Synthetic polypeptide
  REGION 1..216: note = XENP40706 Chain 3 - 2G4[PD-L1]_L1.14 Light Chain

SEQ ID NO: 1425 - protein, 449 aa, synthetic construct; identical to SEQ ID NO: 1311
  REGION 1..449: note = Description of Artificial Sequence: Synthetic polypeptide
  REGION 1..449: note = XENP34961 Chain 1 - avelumab[PD-L1]_H1_IgG1_pI(-)_Isosteric_A_/P VA_/S267K/L368D/K370S-Fc(222)_IgG1_PVA_/S267K/S364K/E357Q

SEQ ID NO: 1426 - protein, 716 aa, synthetic construct
  REGION 1..716: note = Description of Artificial Sequence: Synthetic polypeptide
  REGION 1..716: note = XENP34961 Chain 2 - avelumab[PD-L1]_H1_(G4S)2_1A7[CD28]_H1.14_L1 _scFv(GKPGS)4_(G4S)2_Fc(222)_IgG1_PVA_/S267K/S364K/E357Q
EVQLLESGGGLVQPGGSLRLSCAASGFTFSSYIMMWVRQAPGKGLEWVSSIYPSGGITFYADTVKGRFTISRDNSKNTLYLQMNSLRAEDTAVYYCARIKLGTVTTVDYWGQGTLVTVSSASTKGPSVFPLAPSSKSTSGGTAALGCLVKDYFPEPVTVSWNSGALTSGVHTFPAVLQSSGLYSLSSVVTVPSSSLGTQTYICNVNHKPSNTKVDKKVEPKSCGGGGSGGGGSEVQLLESGGGLVQPGGSLRLSCAASGFTFSSYYMSWVRQAPGKGLEWVSTISESGDSTYYADSVKGRFTISRDNSKNTLYLQMNSLRAEDTAVYYCAKSGPGLRQVGFDYWGQGTLVTVSSGKPGSGKPGSGKPGSGKPGSDIQMTQSPSSLSASVGDRVTITCRASQSISSYLNWYQQKPGKAPKLLIYAASSLQSGVPSRFSGSGSGTDFTLTISSLQPEDFATYYCQQSYSTPFTFGQGTKLEIKGGGGSGGGGSKTHTCPPCPAPPVAGPSVFLFPPKPKDTLMISRTPEVTCVVVDVKHEDPEVKFNWYVDGVEVHNAKTKPREEQYNSTYRVVSVLTVLHQDWLNGKEYKCKVSNKALPAPIEKTISKAKGQPREPQVYTLPPSREQMTKNQVKLTCLVKGFYPSDIAVEWESNGQPENNYKTTPPVLDSDGSFFLYSKLTVDKSRWQQGNVFSCSVMHEALHNHYTQKSLSLSPGK

SEQ ID NO: 1427 - protein, 216 aa, synthetic construct; identical to SEQ ID NO: 1313
  REGION 1..216: note = Description of Artificial Sequence: Synthetic polypeptide
  REGION 1..216: note = XENP34961 Chain 3 - avelumab[PD-L1]_L1 Light Chain

SEQ ID NO: 1428 - protein, 447 aa, synthetic construct; identical to SEQ ID NO: 1052
  REGION 1..447: note = Description of Artificial Sequence: Synthetic polypeptide
  REGION 1..447: note = XENP36154 Chain 1 - 2G4[PD-L1]_H1_IgG1_pI(-)_Isosteric_A_/PVA_/S 267K/L368D/K370S

SEQ ID NO: 1429 - protein, 714 aa, synthetic construct
  REGION 1..714: note = Description of Artificial Sequence: Synthetic polypeptide
  REGION 1..714: note = XENP36154 Chain 2 - 2G4[PD-L1]_H1_(G4S)2_1A7[CD28]_H1.14_L1_scFv (GKPGS)4_(G4S)2_Fc(222)_IgG1_PVA_/S267K/S364K/E357Q
EVQLLESGGGLVQPGGSLRLSCAASGFTFSSYDMSWVRQAPGKRLEWVSTISSGGSFTHYPDSVKGRFTISRDNSKNTLYLQMNSLRAEDTAVYYCVRRSGDWYFDVWGAGTTVTVSSASTKGPSVFPLAPSSKSTSGGTAALGCLVKDYFPEPVTVSWNSGALTSGVHTFPAVLQSSGLYSLSSVVTVPSSSLGTQTYICNVNHKPSNTKVDKKVEPKSCGGGGSGGGGSEVQLLESGGGLVQPGGSLRLSCAASGFTFSSYYMSWVRQAPGKGLEWVSTISESGDSTYYADSVKGRFTISRDNSKNTLYLQMNSLRAEDTAVYYCAKSGPGLRQVGFDYWGQGTLVTVSSGKPGSGKPGSGKPGSGKPGSDIQMTQSPSSLSASVGDRVTITCRASQSISSYLNWYQQKPGKAPKLLIYAASSLQSGVPSRFSGSGSGTDFTLTISSLQPEDFATYYCQQSYSTPFTFGQGTKLEIKGGGGSGGGGSKTHTCPPCPAPPVAGPSVFLFPPKPKDTLMISRTPEVTCVVVDVKHEDPEVKFNWYVDGVEVHNAKTKPREEQYNSTYRVVSVLTVLHQDWLNGKEYKCKVSNKALPAPIEKTISKAKGQPREPQVYTLPPSREQMTKNQVKLTCLVKGFYPSDIAVEWESNGQPENNYKTTPPVLDSDGSFFLYSKLTVDKSRWQQGNVFSCSVMHEALHNHYTQKSLSLSPGK

SEQ ID NO: 1430 - protein, 216 aa, synthetic construct; identical to SEQ ID NO: 1051
  REGION 1..216: note = Description of Artificial Sequence: Synthetic polypeptide
  REGION 1..216: note = XENP36154 Chain 3 - 2G4[PD-L1]_L1 Light Chain

SEQ ID NO: 1431 - protein, 447 aa, synthetic construct; identical to SEQ ID NO: 1317
  REGION 1..447: note = Description of Artificial Sequence: Synthetic polypeptide
  REGION 1..447: note = XENP36803 Chain 1 - 2G4[PD-L1]_H1_IgG1_pI(-)_Isosteric_A_/PVA_/S 267K/L368D/K370S/M428L/N434S

SEQ ID NO: 1432 - protein, 709 aa, synthetic construct
  REGION 1..709: note = Description of Artificial Sequence: Synthetic polypeptide
  REGION 1..709: note = XENP36803 Chain 2 - 2G4[PD-L1]_H1_IgG1_PVA_/S267K/S364K/E357Q/M4 28L/N434S/K447del_(G4S)3_1A7[CD28]_H1.14_L1_scFv(GKPGS)4
EVQLLESGGGLVQPGGSLRLSCAASGFTFSSYDMSWVRQAPGKRLEWVSTISSGGSFTHYPDSVKGRFTISRDNSKNTLYLQMNSLRAEDTAVYYCVRRSGDWYFDVWGAGTTVTVSSASTKGPSVFPLAPSSKSTSGGTAALGCLVKDYFPEPVTVSWNSGALTSGVHTFPAVLQSSGLYSLSSVVTVPSSSLGTQTYICNVNHKPSNTKVDKKVEPKSCDKTHTCPPCPAPPVAGPSVFLFPPKPKDTLMISRTPEVTCVVVDVKHEDPEVKFNWYVDGVEVHNAKTKPREEQYNSTYRVVSVLTVLHQDWLNGKEYKCKVSNKALPAPIEKTISKAKGQPREPQVYTLPPSREQMTKNQVKLTCLVKGFYPSDIAVEWESNGQPENNYKTTPPVLDSDGSFFLYSKLTVDKSRWQQGNVFSCSVLHEALHSHYTQKSLSLSPGGGGGSGGGGSGGGGSEVQLLESGGGLVQPGGSLRLSCAASGFTFSSYYMSWVRQAPGKGLEWVSTISESGDSTYYADSVKGRFTISRDNSKNTLYLQMNSLRAEDTAVYYCAKSGPGLRQVGFDYWGQGTLVTVSSGKPGSGKPGSGKPGSGKPGSDIQMTQSPSSLSASVGDRVTITCRASQSISSYLNWYQQKPGKAPKLLIYAASSLQSGVPSRFSGSGSGTDFTLTISSLQPEDFATYYCQQSYSTPFTFGQGTKLEIK

SEQ ID NO: 1433 - protein, 216 aa, synthetic construct; identical to SEQ ID NO: 1051
  REGION 1..216: note = Description of Artificial Sequence: Synthetic polypeptide
  REGION 1..216: note = XENP36803 Chain 3 - 2G4[PD-L1]_L1 Light Chain

SEQ ID NO: 1434 - protein, 449 aa, synthetic construct
  REGION 1..449: note = Description of Artificial Sequence: Synthetic polypeptide
  REGION 1..449: note = XENP24118 Heavy Chain - avelumab[PD-L1]_H1
EVQLLESGGGLVQPGGSLRLSCAASGFTFSSYIMMWVRQAPGKGLEWVSSIYPSGGITFYADTVKGRFTISRDNSKNTLYLQMNSLRAEDTAVYYCARIKLGTVTTVDYWGQGTLVTVSSASTKGPSVFPLAPSSKSTSGGTAALGCLVKDYFPEPVTVSWNSGALTSGVHTFPAVLQSSGLYSLSSVVTVPSSSLGTQTYICNVNHKPSNTKVDKKVEPKSCDKTHTCPPCPAPPVAGPSVFLFPPKPKDTLMISRTPEVTCVVVDVKHEDPEVKFNWYVDGVEVHNAKTKPREEQYNSTYRVVSVLTVLHQDWLNGKEYKCKVSNKALPAPIEKTISKAKGQPREPQVYTLPPSREEMTKNQVSLTCLVKGFYPSDIAVEWESNGQPENNYKTTPPVLDSDGSFFLYSKLTVDKSRWQQGNVFSCSVMHEALHNHYTQKSLSLSPGK

SEQ ID NO: 1435 - protein, 216 aa, synthetic construct; identical to SEQ ID NO: 1313
  REGION 1..216: note = Description of Artificial Sequence: Synthetic polypeptide
  REGION 1..216: note = XENP24118 Light Chain - avelumab[PD-L1]_L1

SEQ ID NO: 1436 - protein, 444 aa, synthetic construct
  REGION 1..444: note = Description of Artificial Sequence: Synthetic polypeptide
  REGION 1..444: note = XENP31602 Chain 1 - PSMA-H_H1_IgG1_pI(-)_Isosteric_A_/PVA_/S267K /L368D/K370S
EVQLVQSGAEVKKPGASVKVSCKTSGYTFTEYTIHWVRQAPGQSLEWMGNINPNNGGTTYNQKFQGRVTITVDKSTSTAYMELSSLRSEDTAVYYCAAGWNFDYWGQGTLVTVSSASTKGPSVFPLAPSSKSTSGGTAALGCLVKDYFPEPVTVSWNSGALTSGVHTFPAVLQSSGLYSLSSVVTVPSSSLGTQTYICNVNHKPSDTKVDKKVEPKSCDKTHTCPPCPAPPVAGPSVFLFPPKPKDTLMISRTPEVTCVVVDVKHEDPEVKFNWYVDGVEVHNAKTKPREEEYNSTYRVVSVLTVLHQDWLNGKEYKCKVSNKALPAPIEKTISKAKGQPREPQVYTLPPSREEMTKNQVSLTCDVSGFYPSDIAVEWESDGQPENNYKTTPPVLDSDGSFFLYSKLTVDKSRWEQGDVFSCSVMHEALHNHYTQKSLSLSPGK

SEQ ID NO: 1437 - protein, 717 aa, synthetic construct
  REGION 1..717: note = Description of Artificial Sequence: Synthetic polypeptide
  REGION 1..717: note = XENP31602 Chain 2 - PSMA-H_H1_CH1_(G4S)2_[CD3]_H1.30_L1.47_scFv( GKPGS)4_(G4S)2_Fc(222)_IgG1_PVA_/S267K/S364K/E357Q
EVQLVQSGAEVKKPGASVKVSCKTSGYTFTEYTIHWVRQAPGQSLEWMGNINPNNGGTTYNQKFQGRVTITVDKSTSTAYMELSSLRSEDTAVYYCAAGWNFDYWGQGTLVTVSSASTKGPSVFPLAPSSKSTSGGTAALGCLVKDYFPEPVTVSWNSGALTSGVHTFPAVLQSSGLYSLSSVVTVPSSSLGTQTYICNVNHKPSNTKVDKKVEPKSCGGGGSGGGGSEVQLVESGGGLVQPGGSLRLSCAASGFTFSTYAMNWVRQAPGKGLEWVGRIRSKYNNYATYYADSVKGRFTISRDDSKNTLYLQMNSLRAEDTAVYYCVRHGNFGDSYVSWFAYWGQGTLVTVSSGKPGSGKPGSGKPGSGKPGSQAVVTQEPSLTVSPGGTVTLTCGSSTGAVTTSNYANWVQQKPGKSPRGLIGGTNKRAPGVPARFSGSLLGGKAALTISGAQPEDEADYYCALWYSNHWVFGGGTKLTVLGGGGSGGGGSKTHTCPPCPAPPVAGPSVFLFPPKPKDTLMISRTPEVTCVVVDVKHEDPEVKFNWYVDGVEVHNAKTKPREEQYNSTYRVVSVLTVLHQDWLNGKEYKCKVSNKALPAPIEKTISKAKGQPREPQVYTLPPSREQMTKNQVKLTCLVKGFYPSDIAVEWESNGQPENNYKTTPPVLDSDGSFFLYSKLTVDKSRWQQGNVFSCSVMHEALHNHYTQKSLSLSPGK

SEQ ID NO: 1438 - protein, 214 aa, synthetic construct
  REGION 1..214: note = Description of Artificial Sequence: Synthetic polypeptide
  REGION 1..214: note = XENP31602 Chain 3 - PSMA-H_L1 Light Chain
DIVMTQSPDSLAVSLGERATLSCRASQDVGTAVDWYQQKPDQSPKLLIYWASTRHTGVPDRFTGSGSGTDFTLTISSLQAEDVAVYFCQQYNSYPLTFGAGTKVEIKRTVAAPSVFIFPPSDEQLKSGTASVVCLLNNFYPREAKVQWKVDNALQSGNSQESVTEQDSKDSTYSLSSTLTLSKADYEKHKVYACEVTHQGLSSPVTKSFNRGEC

SEQ ID NO: 1439 - protein, 444 aa, synthetic construct; identical to SEQ ID NO: 1436
  REGION 1..444: note = Description of Artificial Sequence: Synthetic polypeptide
  REGION 1..444: note = XENP32220 Chain 1 - PSMA-H_H1_IgG1_pI(-)_Isosteric_A_/PVA_/S267K /L368D/K370S

SEQ ID NO: 1440 - protein, 717 aa, synthetic construct
  REGION 1..717: note = Description of Artificial Sequence: Synthetic polypeptide
  REGION 1..717: note = XENP32220 Chain 2 - PSMA-H_H1_(G4S)_[CD3]_L1.47_H1.32_scFv(GKPGS )4_Fc(222)_IgG1_C220S/PVA_/S267K/S364K/E357Q
EVQLVQSGAEVKKPGASVKVSCKTSGYTFTEYTIHWVRQAPGQSLEWMGNINPNNGGTTYNQKFQGRVTITVDKSTSTAYMELSSLRSEDTAVYYCAAGWNFDYWGQGTLVTVSSASTKGPSVFPLAPSSKSTSGGTAALGCLVKDYFPEPVTVSWNSGALTSGVHTFPAVLQSSGLYSLSSVVTVPSSSLGTQTYICNVNHKPSNTKVDKKVEPKSCGGGGSGGGGSQAVVTQEPSLTVSPGGTVTLTCGSSTGAVTTSNYANWVQQKPGKSPRGLIGGTNKRAPGVPARFSGSLLGGKAALTISGAQPEDEADYYCALWYSNHWVFGGGTKLTVLGKPGSGKPGSGKPGSGKPGSEVQLVESGGGLVQPGGSLRLSCAASGFTFSTYAMNWVRQAPGKGLEWVGRIRSKANNYATYYADSVKGRFTISRDDSKNTLYLQMNSLRAEDTAVYYCVRHGNFGDSYVSWFAYWGQGTLVTVSSGGGGSGGGGSKTHTCPPCPAPPVAGPSVFLFPPKPKDTLMISRTPEVTCVVVDVKHEDPEVKFNWYVDGVEVHNAKTKPREEQYNSTYRVVSVLTVLHQDWLNGKEYKCKVSNKALPAPIEKTISKAKGQPREPQVYTLPPSREQMTKNQVKLTCLVKGFYPSDIAVEWESNGQPENNYKTTPPVLDSDGSFFLYSKLTVDKSRWQQGNVFSCSVMHEALHNHYTQKSLSLSPGK

SEQ ID NO: 1441 - protein, 214 aa, synthetic construct
  REGION 1..214: note = Description of Artificial Sequence: Synthetic polypeptide
  REGION 1..214: note = XENP32220 Chain 3 - PSMA-H_L1.24 Light Chain
DIVMTQSPDSLAVSLGERATLSCRASQDVGTAVDWYQQKPDQSPKLLIYYASTRHTGVPDRFTGSGSGTDFTLTISSLQAEDVAVYFCQQYNSYPLTFGAGTKVEIKRTVAAPSVFIFPPSDEQLKSGTASVVCLLNNFYPREAKVQWKVDNALQSGNSQESVTEQDSKDSTYSLSSTLTLSKADYEKHKVYACEVTHQGLSSPVTKSFNRGEC

SEQ ID NO: 1442 - protein, 254 aa, synthetic construct
  REGION 1..254: note = Description of Artificial Sequence: Synthetic polypeptide
  REGION 1..254: note = CD3 High - [anti-CD3]_H1.30_L1.47_scFv scFv
EVQLVESGGGLVQPGGSLRLSCAASGFTFSTYAMNWVRQAPGKGLEWVGRIRSKYNNYATYYADSVKGRFTISRDDSKNTLYLQMNSLRAEDTAVYYCVRHGNFGDSYVSWFAYWGQGTLVTVSSGKPGSGKPGSGKPGSGKPGSQAVVTQEPSLTVSPGGTVTLTCGSSTGAVTTSNYANWVQQKPGKSPRGLIGGTNKRAPGVPARFSGSLLGGKAALTISGAQPEDEADYYCALWYSNHWVFGGGTKLTVL

SEQ ID NO: 1443 - protein, 125 aa, synthetic construct
  REGION 1..125: note = Description of Artificial Sequence: Synthetic polypeptide
  REGION 1..125: note = CD3 High - [anti-CD3]_H1.30_L1.47_scFv Variable Heavy (vh) Domain
EVQLVESGGGLVQPGGSLRLSCAASGFTFSTYAMNWVRQAPGKGLEWVGRIRSKYNNYATYYADSVKGRFTISRDDSKNTLYLQMNSLRAEDTAVYYCVRHGNFGDSYVSWFAYWGQGTLVTVSS

SEQ ID NO: 1444 - protein, 5 aa, synthetic construct
  REGION 1..5: note = Description of Artificial Sequence: Synthetic peptide
  REGION 1..5: note = CD3 High - [anti-CD3]_H1.30_L1.47_scFv vhCDR1
TYAMN

SEQ ID NO: 1445 - protein, 19 aa, synthetic construct
  REGION 1..19: note = Description of Artificial Sequence: Synthetic peptide
  REGION 1..19: note = CD3 High - [anti-CD3]_H1.30_L1.47_scFv vhCDR2
RIRSKYNNYATYYADSVKG

SEQ ID NO: 1446 - protein, 14 aa, synthetic construct
  REGION 1..14: note = Description of Artificial Sequence: Synthetic peptide
  REGION 1..14: note = CD3 High - [anti-CD3]_H1.30_L1.47_scFv vhCDR3
HGNFGDSYVSWFAY

SEQ ID NO: 1447 - protein, 109 aa, synthetic construct
  REGION 1..109: note = Description of Artificial Sequence: Synthetic polypeptide
  REGION 1..109: note = CD3 High - [anti-CD3]_H1.30_L1.47_scFv Variable Light (vl) Domain
QAVVTQEPSLTVSPGGTVTLTCGSSTGAVTTSNYANWVQQKPGKSPRGLIGGTNKRAPGVPARFSGSLLGGKAALTISGAQPEDEADYYCALWYSNHWVFGGGTKLTVL

SEQ ID NO: 1448 - protein, 14 aa, synthetic construct
  REGION 1..14: note = Description of Artificial Sequence: Synthetic peptide
  REGION 1..14: note = CD3 High - [anti-CD3]_H1.30_L1.47_scFv vlCDR1
GSSTGAVTTSNYAN

SEQ ID NO: 1449 - protein, 7 aa, synthetic construct
  REGION 1..7: note = Description of Artificial Sequence: Synthetic peptide
  REGION 1..7: note = CD3 High - [anti-CD3]_H1.30_L1.47_scFv vlCDR2
GTNKRAP

SEQ ID NO: 1450 - protein, 9 aa, synthetic construct
  REGION 1..9: note = Description of Artificial Sequence: Synthetic peptide
  REGION 1..9: note = CD3 High - [anti-CD3]_H1.30_L1.47_scFv vlCDR3
ALWYSNHWV

SEQ ID NO: 1451 - protein, 20 aa, synthetic construct
  REGION 1..20: note = Description of Artificial Sequence: Synthetic peptide
  REGION 1..20: note = CD3 High - [anti-CD3]_H1.30_L1.47_scFv Linker
GKPGSGKPGSGKPGSGKPGS

SEQ ID NO: 1452 - protein, 254 aa, synthetic construct
  REGION 1..254: note = Description of Artificial Sequence: Synthetic polypeptide
  REGION 1..254: note = CD3 High-Int #1 - [anti-CD3]_H1.32_L1.47_scFv scFv
EVQLVESGGGLVQPGGSLRLSCAASGFTFSTYAMNWVRQAPGKGLEWVGRIRSKANNYATYYADSVKGRFTISRDDSKNTLYLQMNSLRAEDTAVYYCVRHGNFGDSYVSWFAYWGQGTLVTVSSGKPGSGKPGSGKPGSGKPGSQAVVTQEPSLTVSPGGTVTLTCGSSTGAVTTSNYANWVQQKPGKSPRGLIGGTNKRAPGVPARFSGSLLGGKAALTISGAQPEDEADYYCALWYSNHWVFGGGTKLTVL

SEQ ID NO: 1453 - protein, 125 aa, synthetic construct
  REGION 1..125: note = Description of Artificial Sequence: Synthetic polypeptide
  REGION 1..125: note = CD3 High-Int #1 - [anti-CD3]_H1.32_L1.47_scFv Variable Heavy (vh ) Domain
EVQLVESGGGLVQPGGSLRLSCAASGFTFSTYAMNWVRQAPGKGLEWVGRIRSKANNYATYYADSVKGRFTISRDDSKNTLYLQMNSLRAEDTAVYYCVRHGNFGDSYVSWFAYWGQGTLVTVSS

SEQ ID NO: 1454 - protein, 5 aa, synthetic construct
  REGION 1..5: note = Description of Artificial Sequence: Synthetic peptide
  REGION 1..5: note = CD3 High-Int #1 - [anti-CD3]_H1.32_L1.47_scFv vhCDR1
TYAMN

SEQ ID NO: 1455 - protein, 19 aa, synthetic construct
  REGION 1..19: note = Description of Artificial Sequence: Synthetic peptide
  REGION 1..19: note = CD3 High-Int #1 - [anti-CD3]_H1.32_L1.47_scFv vhCDR2
RIRSKANNYATYYADSVKG

SEQ ID NO: 1456 - protein, 14 aa, synthetic construct
  REGION 1..14: note = Description of Artificial Sequence: Synthetic peptide
  REGION 1..14: note = CD3 High-Int #1 - [anti-CD3]_H1.32_L1.47_scFv vhCDR3
HGNFGDSYVSWFAY

SEQ ID NO: 1457 - protein, 109 aa, synthetic construct; identical to SEQ ID NO: 1447
  REGION 1..109: note = Description of Artificial Sequence: Synthetic polypeptide
  REGION 1..109: note = CD3 High-Int #1 - [anti-CD3]_H1.32_L1.47_scFv Variable Light (vl ) Domain

SEQ ID NO: 1458 - protein, 14 aa, synthetic construct
  REGION 1..14: note = Description of Artificial Sequence: Synthetic peptide
  REGION 1..14: note = CD3 High-Int #1 - [anti-CD3]_H1.32_L1.47_scFv vlCDR1
GSSTGAVTTSNYAN

SEQ ID NO: 1459 - protein, 7 aa, synthetic construct
  REGION 1..7: note = Description of Artificial Sequence: Synthetic peptide
  REGION 1..7: note = CD3 High-Int #1 - [anti-CD3]_H1.32_L1.47_scFv vlCDR2
GTNKRAP

SEQ ID NO: 1460 - protein, 9 aa, synthetic construct
  REGION 1..9: note = Description of Artificial Sequence: Synthetic peptide
  REGION 1..9: note = CD3 High-Int #1 - [anti-CD3]_H1.32_L1.47_scFv vlCDR3
ALWYSNHWV

SEQ ID NO: 1461 - protein, 20 aa, synthetic construct
  REGION 1..20: note = Description of Artificial Sequence: Synthetic peptide
  REGION 1..20: note = CD3 High-Int #1 - [anti-CD3]_H1.32_L1.47_scFv Linker
GKPGSGKPGSGKPGSGKPGS

SEQ ID NO: 1462 - protein, 254 aa, synthetic construct
  REGION 1..254: note = Description of Artificial Sequence: Synthetic polypeptide
  REGION 1..254: note = CD3 High-Int #2 - [anti-CD3]_H1.89_L1.47_scFv scFv
EVQLVESGGGLVQPGGSLRLSCAASGFTFSTYAMNWVRQAPGKGLEWVGRIRSKYNNYATYYADSVKGRFTISRDDSKNTLYLQMNSLRAEDTAVYYCVRHGNFGDEYVSWFAYWGQGTLVTVSSGKPGSGKPGSGKPGSGKPGSQAVVTQEPSLTVSPGGTVTLTCGSSTGAVTTSNYANWVQQKPGKSPRGLIGGTNKRAPGVPARFSGSLLGGKAALTISGAQPEDEADYYCALWYSNHWVFGGGTKLTVL

SEQ ID NO: 1463 - protein, 125 aa, synthetic construct
  REGION 1..125: note = Description of Artificial Sequence: Synthetic polypeptide
  REGION 1..125: note = CD3 High-Int #2 - [anti-CD3]_H1.89_L1.47_scFv Variable Heavy (vh ) Domain
EVQLVESGGGLVQPGGSLRLSCAASGFTFSTYAMNWVRQAPGKGLEWVGRIRSKYNNYATYYADSVKGRFTISRDDSKNTLYLQMNSLRAEDTAVYYCVRHGNFGDEYVSWFAYWGQGTLVTVSS

SEQ ID NO: 1464 - protein, 5 aa, synthetic construct
  REGION 1..5: note = Description of Artificial Sequence: Synthetic peptide
  REGION 1..5: note = CD3 High-Int #2 - [anti-CD3]_H1.89_L1.47_scFv vhCDR1
TYAMN

SEQ ID NO: 1465 - protein, 19 aa, synthetic construct
  REGION 1..19: note = Description of Artificial Sequence: Synthetic peptide
  REGION 1..19: note = CD3 High-Int #2 - [anti-CD3]_H1.89_L1.47_scFv vhCDR2
RIRSKYNNYATYYADSVKG

SEQ ID NO: 1466 - protein, 14 aa, synthetic construct
  REGION 1..14: note = Description of Artificial Sequence: Synthetic peptide
  REGION 1..14: note = CD3 High-Int #2 - [anti-CD3]_H1.89_L1.47_scFv vhCDR3
HGNFGDEYVSWFAY

SEQ ID NO: 1467 - protein, 109 aa, synthetic construct; identical to SEQ ID NO: 1447
  REGION 1..109: note = Description of Artificial Sequence: Synthetic polypeptide
  REGION 1..109: note = CD3 High-Int #2 - [anti-CD3]_H1.89_L1.47_scFv Variable Light (vl ) Domain

SEQ ID NO: 1468 - protein, 14 aa, synthetic construct
  REGION 1..14: note = Description of Artificial Sequence: Synthetic peptide
  REGION 1..14: note = CD3 High-Int #2 - [anti-CD3]_H1.89_L1.47_scFv vlCDR1
GSSTGAVTTSNYAN

SEQ ID NO: 1469 - protein, 7 aa, synthetic construct
  REGION 1..7: note = Description of Artificial Sequence: Synthetic peptide
  REGION 1..7: note = CD3 High-Int #2 - [anti-CD3]_H1.89_L1.47_scFv vlCDR2
GTNKRAP

SEQ ID NO: 1470 - protein, 9 aa, synthetic construct
  REGION 1..9: note = Description of Artificial Sequence: Synthetic peptide
  REGION 1..9: note = CD3 High-Int #2 - [anti-CD3]_H1.89_L1.47_scFv vlCDR3
ALWYSNHWV

SEQ ID NO: 1471 - protein, 20 aa, synthetic construct
  REGION 1..20: note = Description of Artificial Sequence: Synthetic peptide
  REGION 1..20: note = CD3 High-Int #2 - [anti-CD3]_H1.89_L1.47_scFv Linker
GKPGSGKPGSGKPGSGKPGS

SEQ ID NO: 1472 - protein, 254 aa, synthetic construct
  REGION 1..254: note = Description of Artificial Sequence: Synthetic polypeptide
  REGION 1..254: note = CD3 High-Int - [anti-CD3]_H1.90_L1.47_scFv scFv
EVQLVESGGGLVQPGGSLRLSCAASGFTFSTYAMNWVRQAPGKGLEWVGRIRSKYNNYATYYADSVKGRFTISRDDSKNTLYLQMNSLRAEDTAVYYCVRHGNFGDPYVSWFAYWGQGTLVTVSSGKPGSGKPGSGKPGSGKPGSQAVVTQEPSLTVSPGGTVTLTCGSSTGAVTTSNYANWVQQKPGKSPRGLIGGTNKRAPGVPARFSGSLLGGKAALTISGAQPEDEADYYCALWYSNHWVFGGGTKLTVL

SEQ ID NO: 1473 - protein, 125 aa, synthetic construct
  REGION 1..125: note = Description of Artificial Sequence: Synthetic polypeptide
  REGION 1..125: note = CD3 High-Int - [anti-CD3]_H1.90_L1.47_scFv Variable Heavy (vh) Domain
EVQLVESGGGLVQPGGSLRLSCAASGFTFSTYAMNWVRQAPGKGLEWVGRIRSKYNNYATYYADSVKGRFTISRDDSKNTLYLQMNSLRAEDTAVYYCVRHGNFGDPYVSWFAYWGQGTLVTVSS

SEQ ID NO: 1474 - protein, 5 aa, synthetic construct
  REGION 1..5: note = Description of Artificial Sequence: Synthetic peptide
  REGION 1..5: note = CD3 High-Int - [anti-CD3]_H1.90_L1.47_scFv vhCDR1
TYAMN

SEQ ID NO: 1475 - protein, 19 aa, synthetic construct
  REGION 1..19: note = Description of Artificial Sequence: Synthetic peptide
  REGION 1..19: note = CD3 High-Int - [anti-CD3]_H1.90_L1.47_scFv vhCDR2
RIRSKYNNYATYYADSVKG

SEQ ID NO: 1476 - protein, 14 aa, synthetic construct
  REGION 1..14: note = Description of Artificial Sequence: Synthetic peptide
  REGION 1..14: note = CD3 High-Int - [anti-CD3]_H1.90_L1.47_scFv vhCDR3
HGNFGDPYVSWFAY

SEQ ID NO: 1477 - protein, 109 aa, synthetic construct; identical to SEQ ID NO: 1447
  REGION 1..109: note = Description of Artificial Sequence: Synthetic polypeptide
  REGION 1..109: note = CD3 High-Int - [anti-CD3]_H1.90_L1.47_scFv Variable Light (vl) Domain

SEQ ID NO: 1478 - protein, 14 aa, synthetic construct
  REGION 1..14: note = Description of Artificial Sequence: Synthetic peptide
  REGION 1..14: note = CD3 High-Int - [anti-CD3]_H1.90_L1.47_scFv vlCDR1
GSSTGAVTTSNYAN

SEQ ID NO: 1479 - protein, 7 aa, synthetic construct
  REGION 1..7: note = Description of Artificial Sequence: Synthetic peptide
  REGION 1..7: note = CD3 High-Int - [anti-CD3]_H1.90_L1.47_scFv vlCDR2
GTNKRAP

SEQ ID NO: 1480 - protein, 9 aa, synthetic construct
  REGION 1..9: note = Description of Artificial Sequence: Synthetic peptide
  REGION 1..9: note = CD3 High-Int - [anti-CD3]_H1.90_L1.47_scFv vlCDR3
ALWYSNHWV

SEQ ID NO: 1481 - protein, 20 aa, synthetic construct
  REGION 1..20: note = Description of Artificial Sequence: Synthetic peptide
  REGION 1..20: note = CD3 High-Int - [anti-CD3]_H1.90_L1.47_scFv Linker
GKPGSGKPGSGKPGSGKPGS

SEQ ID NO: 1482 - protein, 254 aa, synthetic construct
  REGION 1..254: note = Description of Artificial Sequence: Synthetic polypeptide
  REGION 1..254: note = Anti-CD3-Intermediate - [anti-CD3]_H1.33_L1.47_scFv scFv
EVQLVESGGGLVQPGGSLRLSCAASGFTFSTYAMNWVRQAPGKGLEWVGRIRSKYNNYATYYADSVKGRFTISRDDSKNTLYLQMNSLRAEDTAVYYCVRHGNFGDSYVSWFDYWGQGTLVTVSSGKPGSGKPGSGKPGSGKPGSQAVVTQEPSLTVSPGGTVTLTCGSSTGAVTTSNYANWVQQKPGKSPRGLIGGTNKRAPGVPARFSGSLLGGKAALTISGAQPEDEADYYCALWYSNHWVFGGGTKLTVL

SEQ ID NO: 1483 - protein, 125 aa, synthetic construct
  REGION 1..125: note = Description of Artificial Sequence: Synthetic polypeptide
  REGION 1..125: note = Anti-CD3-Intermediate - [anti-CD3]_H1.33_L1.47_scFv Variable Hea vy (vh) Domain
EVQLVESGGGLVQPGGSLRLSCAASGFTFSTYAMNWVRQAPGKGLEWVGRIRSKYNNYATYYADSVKGRFTISRDDSKNTLYLQMNSLRAEDTAVYYCVRHGNFGDSYVSWFDYWGQGTLVTVSS

SEQ ID NO: 1484 - protein, 5 aa, synthetic construct
  REGION 1..5: note = Description of Artificial Sequence: Synthetic peptide
  REGION 1..5: note = Anti-CD3-Intermediate - [anti-CD3]_H1.33_L1.47_scFv vhCDR1
TYAMN

SEQ ID NO: 1485 - protein, 19 aa, synthetic construct
  REGION 1..19: note = Description of Artificial Sequence: Synthetic peptide
  REGION 1..19: note = Anti-CD3-Intermediate - [anti-CD3]_H1.33_L1.47_scFv vhCDR2
RIRSKYNNYATYYADSVKG

SEQ ID NO: 1486 - protein, 14 aa, synthetic construct
  REGION 1..14: note = Description of Artificial Sequence: Synthetic peptide
  REGION 1..14: note = Anti-CD3-Intermediate - [anti-CD3]_H1.33_L1.47_scFv vhCDR3
HGNFGDSYVSWFDY

SEQ ID NO: 1487 - protein, 109 aa, synthetic construct; identical to SEQ ID NO: 1447
  REGION 1..109: note = Description of Artificial Sequence: Synthetic polypeptide
  REGION 1..109: note = Anti-CD3-Intermediate - [anti-CD3]_H1.33_L1.47_scFv Variable Lig ht (vl) Domain

SEQ ID NO: 1488 - protein, 14 aa, synthetic construct
  REGION 1..14: note = Description of Artificial Sequence: Synthetic peptide
  REGION 1..14: note = Anti-CD3-Intermediate - [anti-CD3]_H1.33_L1.47_scFv vlCDR1
GSSTGAVTTSNYAN

SEQ ID NO: 1489 - protein, 7 aa, synthetic construct
  REGION 1..7: note = Description of Artificial Sequence: Synthetic peptide
  REGION 1..7: note = Anti-CD3-Intermediate - [anti-CD3]_H1.33_L1.47_scFv vlCDR2
GTNKRAP

SEQ ID NO: 1490 - protein, 9 aa, synthetic construct
  REGION 1..9: note = Description of Artificial Sequence: Synthetic peptide
  REGION 1..9: note = Anti-CD3-Intermediate - [anti-CD3]_H1.33_L1.47_scFv vlCDR3
ALWYSNHWV

SEQ ID NO: 1491 - protein, 20 aa, synthetic construct
  REGION 1..20: note = Description of Artificial Sequence: Synthetic peptide
  REGION 1..20: note = Anti-CD3-Intermediate - [anti-CD3]_H1.33_L1.47_scFv Linker
GKPGSGKPGSGKPGSGKPGS

SEQ ID NO: 1492 - protein, 254 aa, synthetic construct
  REGION 1..254: note = Description of Artificial Sequence: Synthetic polypeptide
  REGION 1..254: note = CD3 High-Int - [anti-CD3]_H1.31_L1.47_scFv scFv
EVQLVESGGGLVQPGGSLRLSCAASGFTFSTYAMSWVRQAPGKGLEWVGRIRSKYNNYATYYADSVKGRFTISRDDSKNTLYLQMNSLRAEDTAVYYCVRHGNFGDSYVSWFAYWGQGTLVTVSSGKPGSGKPGSGKPGSGKPGSQAVVTQEPSLTVSPGGTVTLTCGSSTGAVTTSNYANWVQQKPGKSPRGLIGGTNKRAPGVPARFSGSLLGGKAALTISGAQPEDEADYYCALWYSNHWVFGGGTKLTVL

SEQ ID NO: 1493 - protein, 125 aa, synthetic construct
  REGION 1..125: note = Description of Artificial Sequence: Synthetic polypeptide
  REGION 1..125: note = CD3 High-Int - [anti-CD3]_H1.31_L1.47_scFv Variable Heavy (vh) Domain
EVQLVESGGGLVQPGGSLRLSCAASGFTFSTYAMSWVRQAPGKGLEWVGRIRSKYNNYATYYADSVKGRFTISRDDSKNTLYLQMNSLRAEDTAVYYCVRHGNFGDSYVSWFAYWGQGTLVTVSS

SEQ ID NO: 1494 - protein, 5 aa, synthetic construct
  REGION 1..5: note = Description of Artificial Sequence: Synthetic peptide
  REGION 1..5: note = CD3 High-Int - [anti-CD3]_H1.31_L1.47_scFv vhCDR1
TYAMS

SEQ ID NO: 1495 - protein, 19 aa, synthetic construct
  REGION 1..19: note = Description of Artificial Sequence: Synthetic peptide
  REGION 1..19: note = CD3 High-Int - [anti-CD3]_H1.31_L1.47_scFv vhCDR2
RIRSKYNNYATYYADSVKG

SEQ ID NO: 1496 - protein, 14 aa, synthetic construct
  REGION 1..14: note = Description of Artificial Sequence: Synthetic peptide
  REGION 1..14: note = CD3 High-Int - [anti-CD3]_H1.31_L1.47_scFv vhCDR3
HGNFGDSYVSWFAY

SEQ ID NO: 1497 - protein, 109 aa, synthetic construct; identical to SEQ ID NO: 1447
  REGION 1..109: note = Description of Artificial Sequence: Synthetic polypeptide
  REGION 1..109: note = CD3 High-Int - [anti-CD3]_H1.31_L1.47_scFv Variable Light (vl) Domain

SEQ ID NO: 1498 - protein, 14 aa, synthetic construct
  REGION 1..14: note = Description of Artificial Sequence: Synthetic peptide
  REGION 1..14: note = CD3 High-Int - [anti-CD3]_H1.31_L1.47_scFv vlCDR1
GSSTGAVTTSNYAN

SEQ ID NO: 1499 - protein, 7 aa, synthetic construct
  REGION 1..7: note = Description of Artificial Sequence: Synthetic peptide
  REGION 1..7: note = CD3 High-Int - [anti-CD3]_H1.31_L1.47_scFv vlCDR2
GTNKRAP

SEQ ID NO: 1500 - protein, 9 aa, synthetic construct
  REGION 1..9: note = Description of Artificial Sequence: Synthetic peptide
  REGION 1..9: note = CD3 High-Int - [anti-CD3]_H1.31_L1.47_scFv vlCDR3
ALWYSNHWV

SEQ ID NO: 1501 - protein, 20 aa, synthetic construct
  REGION 1..20: note = Description of Artificial Sequence: Synthetic peptide
  REGION 1..20: note = CD3 High-Int - [anti-CD3]_H1.31_L1.47_scFv Linker
GKPGSGKPGSGKPGSGKPGS

SEQ ID NO: 1502 - protein, 254 aa, synthetic construct
  REGION 1..254: note = Description of Artificial Sequence: Synthetic polypeptide
  REGION 1..254: note = CD3 High[VL-VH] - [anti-CD3]_L1.47_ H1.30_scFv scFv
QAVVTQEPSLTVSPGGTVTLTCGSSTGAVTTSNYANWVQQKPGKSPRGLIGGTNKRAPGVPARFSGSLLGGKAALTISGAQPEDEADYYCALWYSNHWVFGGGTKLTVLGKPGSGKPGSGKPGSGKPGSEVQLVESGGGLVQPGGSLRLSCAASGFTFSTYAMNWVRQAPGKGLEWVGRIRSKYNNYATYYADSVKGRFTISRDDSKNTLYLQMNSLRAEDTAVYYCVRHGNFGDSYVSWFAYWGQGTLVTVSS

SEQ ID NO: 1503 - protein, 109 aa, synthetic construct; identical to SEQ ID NO: 1447
  REGION 1..109: note = Description of Artificial Sequence: Synthetic polypeptide
  REGION 1..109: note = CD3 High[VL-VH] - [anti-CD3]_L1.47_ H1.30_scFv Variable Light (v l) Domain

SEQ ID NO: 1504 - protein, 14 aa, synthetic construct
  REGION 1..14: note = Description of Artificial Sequence: Synthetic peptide
  REGION 1..14: note = CD3 High[VL-VH] - [anti-CD3]_L1.47_ H1.30_scFv vlCDR1
GSSTGAVTTSNYAN

SEQ ID NO: 1505 - protein, 7 aa, synthetic construct
  REGION 1..7: note = Description of Artificial Sequence: Synthetic peptide
  REGION 1..7: note = CD3 High[VL-VH] - [anti-CD3]_L1.47_ H1.30_scFv vlCDR2
GTNKRAP

SEQ ID NO: 1506 - protein, 9 aa, synthetic construct
  REGION 1..9: note = Description of Artificial Sequence: Synthetic peptide
  REGION 1..9: note = CD3 High[VL-VH] - [anti-CD3]_L1.47_ H1.30_scFv vlCDR3
ALWYSNHWV

SEQ ID NO: 1507 - protein, 125 aa, synthetic construct; identical to SEQ ID NO: 1443
  REGION 1..125: note = Description of Artificial Sequence: Synthetic polypeptide
  REGION 1..125: note = CD3 High[VL-VH] - [anti-CD3]_L1.47_ H1.30_scFv Variable Heavy (v h) Domain

SEQ ID NO: 1508 - protein, 5 aa, synthetic construct
  REGION 1..5: note = Description of Artificial Sequence: Synthetic peptide
  REGION 1..5: note = CD3 High[VL-VH] - [anti-CD3]_L1.47_ H1.30_scFv vhCDR1
TYAMN

SEQ ID NO: 1509 - protein, 19 aa, synthetic construct
  REGION 1..19: note = Description of Artificial Sequence: Synthetic peptide
  REGION 1..19: note = CD3 High[VL-VH] - [anti-CD3]_L1.47_ H1.30_scFv vhCDR2
RIRSKYNNYATYYADSVKG

SEQ ID NO: 1510 - protein, 14 aa, synthetic construct
  REGION 1..14: note = Description of Artificial Sequence: Synthetic peptide
  REGION 1..14: note = CD3 High[VL-VH] - [anti-CD3]_L1.47_ H1.30_scFv vhCDR3
HGNFGDSYVSWFAY

SEQ ID NO: 1511 - protein, 20 aa, synthetic construct
  REGION 1..20: note = Description of Artificial Sequence: Synthetic peptide
  REGION 1..20: note = CD3 High[VL-VH] - [anti-CD3]_L1.47_ H1.30_scFv Linker
GKPGSGKPGSGKPGSGKPGS

SEQ ID NO: 1512 - protein, 254 aa, synthetic construct
  REGION 1..254: note = Description of Artificial Sequence: Synthetic polypeptide
  REGION 1..254: note = CD3 High-Int #1[VL-VH] - [anti-CD3]_L1.47_ H1.32_scFv scFv
QAVVTQEPSLTVSPGGTVTLTCGSSTGAVTTSNYANWVQQKPGKSPRGLIGGTNKRAPGVPARFSGSLLGGKAALTISGAQPEDEADYYCALWYSNHWVFGGGTKLTVLGKPGSGKPGSGKPGSGKPGSEVQLVESGGGLVQPGGSLRLSCAASGFTFSTYAMNWVRQAPGKGLEWVGRIRSKANNYATYYADSVKGRFTISRDDSKNTLYLQMNSLRAEDTAVYYCVRHGNFGDSYVSWFAYWGQGTLVTVSS

SEQ ID NO: 1513 - protein, 109 aa, synthetic construct; identical to SEQ ID NO: 1447
  REGION 1..109: note = Description of Artificial Sequence: Synthetic polypeptide
  REGION 1..109: note = CD3 High-Int #1[VL-VH] - [anti-CD3]_L1.47_ H1.32_scFv Variable Light (vl) Domain

SEQ ID NO: 1514 - protein, 14 aa, synthetic construct
  REGION 1..14: note = Description of Artificial Sequence: Synthetic peptide
  REGION 1..14: note = CD3 High-Int #1[VL-VH] - [anti-CD3]_L1.47_ H1.32_scFv vlCDR1
GSSTGAVTTSNYAN

SEQ ID NO: 1515 - protein, 7 aa, synthetic construct
  REGION 1..7: note = Description of Artificial Sequence: Synthetic peptide
  REGION 1..7: note = CD3 High-Int #1[VL-VH] - [anti-CD3]_L1.47_ H1.32_scFv vlCDR2
GTNKRAP

SEQ ID NO: 1516 - protein, 9 aa, synthetic construct
  REGION 1..9: note = Description of Artificial Sequence: Synthetic peptide
  REGION 1..9: note = CD3 High-Int #1[VL-VH] - [anti-CD3]_L1.47_ H1.32_scFv vlCDR3
ALWYSNHWV

SEQ ID NO: 1517 - protein, 125 aa, synthetic construct; identical to SEQ ID NO: 1453
  REGION 1..125: note = Description of Artificial Sequence: Synthetic polypeptide
  REGION 1..125: note = CD3 High-Int #1[VL-VH] - [anti-CD3]_L1.47_ H1.32_scFv Variable Heavy (vh) Domain

SEQ ID NO: 1518 - protein, 5 aa, synthetic construct
  REGION 1..5: note = Description of Artificial Sequence: Synthetic peptide
  REGION 1..5: note = CD3 High-Int #1[VL-VH] - [anti-CD3]_L1.47_ H1.32_scFv vhCDR1
TYAMN

SEQ ID NO: 1519 - protein, 19 aa, synthetic construct
  REGION 1..19: note = Description of Artificial Sequence: Synthetic peptide
  REGION 1..19: note = CD3 High-Int #1[VL-VH] - [anti-CD3]_L1.47_ H1.32_scFv vhCDR2
RIRSKANNYATYYADSVKG

SEQ ID NO: 1520 - protein, 14 aa, synthetic construct
  REGION 1..14: note = Description of Artificial Sequence: Synthetic peptide
  REGION 1..14: note = CD3 High-Int #1[VL-VH] - [anti-CD3]_L1.47_ H1.32_scFv vhCDR3
HGNFGDSYVSWFAY

SEQ ID NO: 1521 - protein, 20 aa, synthetic construct
  REGION 1..20: note = Description of Artificial Sequence: Synthetic peptide
  REGION 1..20: note = CD3 High-Int #1[VL-VH] - [anti-CD3]_L1.47_ H1.32_scFv Linker
GKPGSGKPGSGKPGSGKPGS

SEQ ID NO: 1522 - protein, 254 aa, synthetic construct
  REGION 1..254: note = Description of Artificial Sequence: Synthetic polypeptide
  REGION 1..254: note = CD3 High-Int #2[VL-VH] - [anti-CD3]_L1.47_ H1.89_scFv scFv
QAVVTQEPSLTVSPGGTVTLTCGSSTGAVTTSNYANWVQQKPGKSPRGLIGGTNKRAPGVPARFSGSLLGGKAALTISGAQPEDEADYYCALWYSNHWVFGGGTKLTVLGKPGSGKPGSGKPGSGKPGSEVQLVESGGGLVQPGGSLRLSCAASGFTFSTYAMNWVRQAPGKGLEWVGRIRSKYNNYATYYADSVKGRFTISRDDSKNTLYLQMNSLRAEDTAVYYCVRHGNFGDEYVSWFAYWGQGTLVTVSS

SEQ ID NO: 1523 - protein, 109 aa, synthetic construct; identical to SEQ ID NO: 1447
  REGION 1..109: note = Description of Artificial Sequence: Synthetic polypeptide
  REGION 1..109: note = CD3 High-Int #2[VL-VH] - [anti-CD3]_L1.47_ H1.89_scFv Variable Light (vl) Domain

SEQ ID NO: 1524 - protein, 14 aa, synthetic construct
  REGION 1..14: note = Description of Artificial Sequence: Synthetic peptide
  REGION 1..14: note = CD3 High-Int #2[VL-VH] - [anti-CD3]_L1.47_ H1.89_scFv vlCDR1
GSSTGAVTTSNYAN

SEQ ID NO: 1525 - protein, 7 aa, synthetic construct
  REGION 1..7: note = Description of Artificial Sequence: Synthetic peptide
  REGION 1..7: note = CD3 High-Int #2[VL-VH] - [anti-CD3]_L1.47_ H1.89_scFv vlCDR2
GTNKRAP

SEQ ID NO: 1526 - protein, 9 aa, synthetic construct
  REGION 1..9: note = Description of Artificial Sequence: Synthetic peptide
  REGION 1..9: note = CD3 High-Int #2[VL-VH] - [anti-CD3]_L1.47_ H1.89_scFv vlCDR3
ALWYSNHWV

SEQ ID NO: 1527 - protein, 125 aa, synthetic construct; identical to SEQ ID NO: 1463
  REGION 1..125: note = Description of Artificial Sequence: Synthetic polypeptide
  REGION 1..125: note = CD3 High-Int #2[VL-VH] - [anti-CD3]_L1.47_ H1.89_scFv Variable Heavy (vh) Domain

SEQ ID NO: 1528 - protein, 5 aa, synthetic construct
  REGION 1..5: note = Description of Artificial Sequence: Synthetic peptide
  REGION 1..5: note = CD3 High-Int #2[VL-VH] - [anti-CD3]_L1.47_ H1.89_scFv vhCDR1
TYAMN

SEQ ID NO: 1529 - protein, 19 aa, synthetic construct
  REGION 1..19: note = Description of Artificial Sequence: Synthetic peptide
  REGION 1..19: note = CD3 High-Int #2[VL-VH] - [anti-CD3]_L1.47_ H1.89_scFv vhCDR2
RIRSKYNNYATYYADSVKG

SEQ ID NO: 1530 - protein, 14 aa, synthetic construct
  REGION 1..14: note = Description of Artificial Sequence: Synthetic peptide
  REGION 1..14: note = CD3 High-Int #2[VL-VH] - [anti-CD3]_L1.47_ H1.89_scFv vhCDR3
HGNFGDEYVSWFAY

SEQ ID NO: 1531 - protein, 20 aa, synthetic construct
  REGION 1..20: note = Description of Artificial Sequence: Synthetic peptide
  REGION 1..20: note = CD3 High-Int #2[VL-VH] - [anti-CD3]_L1.47_ H1.89_scFv Linker
GKPGSGKPGSGKPGSGKPGS

SEQ ID NO: 1532 - protein, 254 aa, synthetic construct
  REGION 1..254: note = Description of Artificial Sequence: Synthetic polypeptide
  REGION 1..254: note = CD3 High-Int[VL-VH] - [anti-CD3]_L1.47_ H1.90_scFv scFv
QAVVTQEPSLTVSPGGTVTLTCGSSTGAVTTSNYANWVQQKPGKSPRGLIGGTNKRAPGVPARFSGSLLGGKAALTISGAQPEDEADYYCALWYSNHWVFGGGTKLTVLGKPGSGKPGSGKPGSGKPGSEVQLVESGGGLVQPGGSLRLSCAASGFTFSTYAMNWVRQAPGKGLEWVGRIRSKYNNYATYYADSVKGRFTISRDDSKNTLYLQMNSLRAEDTAVYYCVRHGNFGDPYVSWFAYWGQGTLVTVSS

SEQ ID NO: 1533 - protein, 109 aa, synthetic construct; identical to SEQ ID NO: 1447
  REGION 1..109: note = Description of Artificial Sequence: Synthetic polypeptide
  REGION 1..109: note = CD3 High-Int[VL-VH] - [anti-CD3]_L1.47_ H1.90_scFv Variable Light (vl) Domain

SEQ ID NO: 1534 - protein, 14 aa, synthetic construct
  REGION 1..14: note = Description of Artificial Sequence: Synthetic peptide
  REGION 1..14: note = CD3 High-Int[VL-VH] - [anti-CD3]_L1.47_ H1.90_scFv vlCDR1
GSSTGAVTTSNYAN

SEQ ID NO: 1535 - protein, 7 aa, synthetic construct
  REGION 1..7: note = Description of Artificial Sequence: Synthetic peptide
  REGION 1..7: note = CD3 High-Int[VL-VH] - [anti-CD3]_L1.47_ H1.90_scFv vlCDR2
GTNKRAP

SEQ ID NO: 1536 - protein, 9 aa, synthetic construct
  REGION 1..9: note = Description of Artificial Sequence: Synthetic peptide
  REGION 1..9: note = CD3 High-Int[VL-VH] - [anti-CD3]_L1.47_ H1.90_scFv vlCDR3
ALWYSNHWV

SEQ ID NO: 1537 - protein, 125 aa, synthetic construct; identical to SEQ ID NO: 1473
  REGION 1..125: note = Description of Artificial Sequence: Synthetic polypeptide
  REGION 1..125: note = CD3 High-Int[VL-VH] - [anti-CD3]_L1.47_ H1.90_scFv Variable Heavy (vh) Domain

SEQ ID NO: 1538 - protein, 5 aa, synthetic construct
  REGION 1..5: note = Description of Artificial Sequence: Synthetic peptide
  REGION 1..5: note = CD3 High-Int[VL-VH] - [anti-CD3]_L1.47_ H1.90_scFv vhCDR1
TYAMN

SEQ ID NO: 1539 - protein, 19 aa, synthetic construct
  REGION 1..19: note = Description of Artificial Sequence: Synthetic peptide
  REGION 1..19: note = CD3 High-Int[VL-VH] - [anti-CD3]_L1.47_ H1.90_scFv vhCDR2
RIRSKYNNYATYYADSVKG

SEQ ID NO: 1540 - protein, 14 aa, synthetic construct
  REGION 1..14: note = Description of Artificial Sequence: Synthetic peptide
  REGION 1..14: note = CD3 High-Int[VL-VH] - [anti-CD3]_L1.47_ H1.90_scFv vhCDR3
HGNFGDPYVSWFAY

SEQ ID NO: 1541 - protein, 20 aa, synthetic construct
  REGION 1..20: note = Description of Artificial Sequence: Synthetic peptide
  REGION 1..20: note = CD3 High-Int[VL-VH] - [anti-CD3]_L1.47_ H1.90_scFv Linker
GKPGSGKPGSGKPGSGKPGS

SEQ ID NO: 1542 - protein, 254 aa, synthetic construct
  REGION 1..254: note = Description of Artificial Sequence: Synthetic polypeptide
  REGION 1..254: note = Anti-CD3-Intermediate[VL-VH] - [anti-CD3]_L1.47_ H1.33_scFv scFv
QAVVTQEPSLTVSPGGTVTLTCGSSTGAVTTSNYANWVQQKPGKSPRGLIGGTNKRAPGVPARFSGSLLGGKAALTISGAQPEDEADYYCALWYSNHWVFGGGTKLTVLGKPGSGKPGSGKPGSGKPGSEVQLVESGGGLVQPGGSLRLSCAASGFTFSTYAMNWVRQAPGKGLEWVGRIRSKYNNYATYYADSVKGRFTISRDDSKNTLYLQMNSLRAEDTAVYYCVRHGNFGDSYVSWFDYWGQGTLVTVSS

SEQ ID NO: 1543 - protein, 109 aa, synthetic construct; identical to SEQ ID NO: 1447
  REGION 1..109: note = Description of Artificial Sequence: Synthetic polypeptide
  REGION 1..109: note = Anti-CD3-Intermediate[VL-VH] - [anti-CD3]_L1.47_ H1.33_scFv Vari able Light (vl) Domain

SEQ ID NO: 1544 - protein, 14 aa, synthetic construct
  REGION 1..14: note = Description of Artificial Sequence: Synthetic peptide
  REGION 1..14: note = Anti-CD3-Intermediate[VL-VH] - [anti-CD3]_L1.47_ H1.33_scFv vlCD R1
GSSTGAVTTSNYAN

SEQ ID NO: 1545 - protein, 7 aa, synthetic construct
  REGION 1..7: note = Description of Artificial Sequence: Synthetic peptide
  REGION 1..7: note = Anti-CD3-Intermediate[VL-VH] - [anti-CD3]_L1.47_ H1.33_scFv vlCD R2
GTNKRAP

SEQ ID NO: 1546 - protein, 9 aa, synthetic construct
  REGION 1..9: note = Description of Artificial Sequence: Synthetic peptide
  REGION 1..9: note = Anti-CD3-Intermediate[VL-VH] - [anti-CD3]_L1.47_ H1.33_scFv vlCD R3
ALWYSNHWV

SEQ ID NO: 1547 - protein, 125 aa, synthetic construct; identical to SEQ ID NO: 1483
  REGION 1..125: note = Description of Artificial Sequence: Synthetic polypeptide
  REGION 1..125: note = Anti-CD3-Intermediate[VL-VH] - [anti-CD3]_L1.47_ H1.33_scFv Vari able Heavy (vh) Domain

SEQ ID NO: 1548 - protein, 5 aa, synthetic construct
  REGION 1..5: note = Description of Artificial Sequence: Synthetic peptide
  REGION 1..5: note = Anti-CD3-Intermediate[VL-VH] - [anti-CD3]_L1.47_ H1.33_scFv vhCD R1
TYAMN

SEQ ID NO: 1549 - protein, 19 aa, synthetic construct
  REGION 1..19: note = Description of Artificial Sequence: Synthetic peptide
  REGION 1..19: note = Anti-CD3-Intermediate[VL-VH] - [anti-CD3]_L1.47_ H1.33_scFv vhCD R2
RIRSKYNNYATYYADSVKG

SEQ ID NO: 1550 - protein, 14 aa, synthetic construct
  REGION 1..14: note = Description of Artificial Sequence: Synthetic peptide
  REGION 1..14: note = Anti-CD3-Intermediate[VL-VH] - [anti-CD3]_L1.47_ H1.33_scFv vhCD R3
HGNFGDSYVSWFDY

SEQ ID NO: 1551 - protein, 20 aa, synthetic construct
  REGION 1..20: note = Description of Artificial Sequence: Synthetic peptide
  REGION 1..20: note = Anti-CD3-Intermediate[VL-VH] - [anti-CD3]_L1.47_ H1.33_scFv Link er
GKPGSGKPGSGKPGSGKPGS

SEQ ID NO: 1552 - protein, 254 aa, synthetic construct
  REGION 1..254: note = Description of Artificial Sequence: Synthetic polypeptide
  REGION 1..254: note = CD3 High-Int[VL-VH] - [anti-CD3]_L1.47_ H1.31_scFv scFv
QAVVTQEPSLTVSPGGTVTLTCGSSTGAVTTSNYANWVQQKPGKSPRGLIGGTNKRAPGVPARFSGSLLGGKAALTISGAQPEDEADYYCALWYSNHWVFGGGTKLTVLGKPGSGKPGSGKPGSGKPGSEVQLVESGGGLVQPGGSLRLSCAASGFTFSTYAMSWVRQAPGKGLEWVGRIRSKYNNYATYYADSVKGRFTISRDDSKNTLYLQMNSLRAEDTAVYYCVRHGNFGDSYVSWFAYWGQGTLVTVSS

SEQ ID NO: 1553 - protein, 109 aa, synthetic construct; identical to SEQ ID NO: 1447
  REGION 1..109: note = Description of Artificial Sequence: Synthetic polypeptide
  REGION 1..109: note = CD3 High-Int[VL-VH] - [anti-CD3]_L1.47_ H1.31_scFv Variable Light (vl) Domain

SEQ ID NO: 1554 - protein, 14 aa, synthetic construct
  REGION 1..14: note = Description of Artificial Sequence: Synthetic peptide
  REGION 1..14: note = CD3 High-Int[VL-VH] - [anti-CD3]_L1.47_ H1.31_scFv vlCDR1
GSSTGAVTTSNYAN

SEQ ID NO: 1555 - protein, 7 aa, synthetic construct
  REGION 1..7: note = Description of Artificial Sequence: Synthetic peptide
  REGION 1..7: note = CD3 High-Int[VL-VH] - [anti-CD3]_L1.47_ H1.31_scFv vlCDR2
GTNKRAP

SEQ ID NO: 1556 - protein, 9 aa, synthetic construct
  REGION 1..9: note = Description of Artificial Sequence: Synthetic peptide
  REGION 1..9: note = CD3 High-Int[VL-VH] - [anti-CD3]_L1.47_ H1.31_scFv vlCDR3
ALWYSNHWV

SEQ ID NO: 1557 - protein, 125 aa, synthetic construct; identical to SEQ ID NO: 1493
  REGION 1..125: note = Description of Artificial Sequence: Synthetic polypeptide
  REGION 1..125: note = CD3 High-Int[VL-VH] - [anti-CD3]_L1.47_ H1.31_scFv Variable Heavy (vh) Domain

SEQ ID NO: 1558 - protein, 5 aa, synthetic construct
  REGION 1..5: note = Description of Artificial Sequence: Synthetic peptide
  REGION 1..5: note = CD3 High-Int[VL-VH] - [anti-CD3]_L1.47_ H1.31_scFv vhCDR1
TYAMS

SEQ ID NO: 1559 - protein, 19 aa, synthetic construct
  REGION 1..19: note = Description of Artificial Sequence: Synthetic peptide
  REGION 1..19: note = CD3 High-Int[VL-VH] - [anti-CD3]_L1.47_ H1.31_scFv vhCDR2
RIRSKYNNYATYYADSVKG

SEQ ID NO: 1560 - protein, 14 aa, synthetic construct
  REGION 1..14: note = Description of Artificial Sequence: Synthetic peptide
  REGION 1..14: note = CD3 High-Int[VL-VH] - [anti-CD3]_L1.47_ H1.31_scFv vhCDR3
HGNFGDSYVSWFAY

SEQ ID NO: 1561 - protein, 20 aa, synthetic construct
  REGION 1..20: note = Description of Artificial Sequence: Synthetic peptide
  REGION 1..20: note = CD3 High-Int[VL-VH] - [anti-CD3]_L1.47_ H1.31_scFv Linker
GKPGSGKPGSGKPGSGKPGS

SEQ ID NO: 1562 - protein, 446 aa, synthetic construct
  REGION 1..446: note = Description of Artificial Sequence: Synthetic polypeptide
  REGION 1..446: note = XENP29154 Heavy Chain - TGN1412_hu5.11A1[CD28]_H1
QVQLVQSGAEVKKPGASVKVSCKASGYTFTSYYIHWVRQAPGQGLEWIGCIYPGNVNTNYNEKFKDRATLTVDTSISTAYMELSRLRSDDTAVYFCTRSHYGLDWNFDVWGQGTTVTVSSASTKGPSVFPLAPCSRSTSESTAALGCLVKDYFPEPVTVSWNSGALTSGVHTFPAVLQSSGLYSLSSVVTVPSSSLGTKTYTCNVDHKPSNTKVDKRVESKYGPPCPSCPAPEFLGGPSVFLFPPKPKDTLMISRTPEVTCVVVDVSQEDPEVQFNWYVDGVEVHNAKTKPREEQFNSTYRVVSVLTVLHQDWLNGKEYKCKVSNKGLPSSIEKTISKAKGQPREPQVYTLPPSQEEMTKNQVSLTCLVKGFYPSDIAVEWESNGQPENNYKTTPPVLDSDGSFFLYSRLTVDKSRWQEGNVFSCSVMHEALHNHYTQKSLSLSLG

SEQ ID NO: 1563 - protein, 214 aa, synthetic construct
  REGION 1..214: note = Description of Artificial Sequence: Synthetic polypeptide
  REGION 1..214: note = XENP29154 Light Chain - TGN1412_hu5.11A1[CD28]_L1
DIQMTQSPSSLSASVGDRVTITCHASQNIYVWLNWYQQKPGKAPKLLIYKASNLHTGVPSRFSGSGSGTDFTLTISSLQPEDFATYYCQQGQTYPYTFGGGTKVEIKRTVAAPSVFIFPPSDEQLKSGTASVVCLLNNFYPREAKVQWKVDNALQSGNSQESVTEQDSKDSTYSLSSTLTLSKADYEKHKVYACEVTHQGLSSPVTKSFNRGEC

SEQ ID NO: 1564 - protein, 30 aa, synthetic construct
  REGION 1..30: note = Description of Artificial Sequence: Synthetic polypeptide
  REGION 1..30: note = 1A7 VH HFR1
  MOD_RES 28: note = T, S, or N
  MOD_RES 29: note = F or L
  MOD_RES 30: note = S, E, R, K, G, T, A, or N
EVQLLESGGGLVQPGGSLRLSCAASGFXXX

SEQ ID NO: 1565 - skipped

SEQ ID NO: 1566 - protein, 14 aa, synthetic construct
  REGION 1..14: note = Description of Artificial Sequence: Synthetic peptide
  REGION 1..14: note = 1A7 VH HFR2
  MOD_RES 14: note = S or A
WVRQAPGKGLEWVX

SEQ ID NO: 1567 - protein, 17 aa, synthetic construct
  REGION 1..17: note = Description of Artificial Sequence: Synthetic peptide
  REGION 1..17: note = 1A7 VH HCDR2
  MOD_RES 1: note = T or S
  MOD_RES 3: note = S, D, E, Y, or T
  MOD_RES 4: note = G, D, E, A, Y, S, N, or T
  MOD_RES 5: note = S, D, N, or G
  MOD_RES 6: note = D, T, Y, S, or A
  MOD_RES 7: note = D, T, Y, S, or A
  MOD_RES 8: note = S, Y, A, T, D, or N
XIXXXXXXTYYADSVKG

SEQ ID NO: 1568 - protein, 32 aa, synthetic construct
  REGION 1..32: note = Description of Artificial Sequence: Synthetic polypeptide
  REGION 1..32: note = 1A7 VH HFR3
RFTISRDNSKNTLYLQMNSLRAEDTAVYYCAK

SEQ ID NO: 1569 - protein, 12 aa, synthetic construct
  REGION 1..12: note = Description of Artificial Sequence: Synthetic peptide
  REGION 1..12: note = 1A7 VH HCDR3
SGPGLRQVGFDY

SEQ ID NO: 1570 - protein, 11 aa, synthetic construct
  REGION 1..11: note = Description of Artificial Sequence: Synthetic peptide
  REGION 1..11: note = 1A7 VH HFR4
WGQGTLVTVSS

SEQ ID NO: 1571 - protein, 23 aa, synthetic construct
  REGION 1..23: note = Description of Artificial Sequence: Synthetic peptide
  REGION 1..23: note = 1A7 VL LFR1
DIQMTQSPSSLSASVGDRVTITC

SEQ ID NO: 1572 - protein, 11 aa, synthetic construct
  REGION 1..11: note = Description of Artificial Sequence: Synthetic peptide
  REGION 1..11: note = 1A7 VL LCDR1
  MOD_RES 8: note = S, A, D, G, H, K, N, Q, T, V, or Y
  MOD_RES 9: note = Y, A, D, F, H, K, L, N, Q, S, or W
  MOD_RES 11: note = N, A, D, G, H, Q, S, T, or Y
RASQSISXXLX

SEQ ID NO: 1573 - protein, 15 aa, synthetic construct
  REGION 1..15: note = Description of Artificial Sequence: Synthetic peptide
  REGION 1..15: note = 1A7 VL LFR2
WYQQKPGKAPKLLIY

SEQ ID NO: 1574 - skipped

SEQ ID NO: 1575 - protein, 32 aa, synthetic construct
  REGION 1..32: note = Description of Artificial Sequence: Synthetic polypeptide
  REGION 1..32: note = 1A7 VL LFR3
GVPSRFSGSGSGTDFTLTISSLQPEDFATYYC

SEQ ID NO: 1576 - protein, 9 aa, synthetic construct
  REGION 1..9: note = Description of Artificial Sequence: Synthetic peptide
  REGION 1..9: note = 1A7 VL LCDR3
  MOD_RES 3: note = S, A, D, F, H, K, L, T, V, or Y
  MOD_RES 4: note = Y, A, D, F, H, K, L, Q, V, or W
  MOD_RES 5: note = S, A, D, G, H, K, N, Q, T, V, or Y
  MOD_RES 6: note = T, A, D, F, I, K, L, Q, S, V, or Y
  MOD_RES 8: note = F, I, L, or W
QQXXXXPXT

SEQ ID NO: 1577 - protein, 10 aa, synthetic construct
  REGION 1..10: note = Description of Artificial Sequence: Synthetic peptide
  REGION 1..10: note = 1A7 VL LFR4
FGQGTKLEIK

SEQ ID NO: 1578 - protein, 30 aa, synthetic construct
  REGION 1..30: note = Description of Artificial Sequence: Synthetic polypeptide
  REGION 1..30: note = 2G4 VH HFR1
  MOD_RES 30: note = P, S, R, or H
EVQLLESGGGLVQPGGSLRLSCAASGFTFX

SEQ ID NO: 1579 - skipped

SEQ ID NO: 1580 - protein, 14 aa, synthetic construct
  REGION 1..14: note = Description of Artificial Sequence: Synthetic peptide
  REGION 1..14: note = 2G4 VH HFR2
  MOD_RES 9: note = R or G
WVRQAPGKXLEWVS

SEQ ID NO: 1581 - protein, 17 aa, synthetic construct
  REGION 1..17: note = Description of Artificial Sequence: Synthetic peptide
  REGION 1..17: note = 2G4 VH HCDR2
  MOD_RES 7: note = S or R
TISSGGXFTHYPDSVKG

SEQ ID NO: 1582 - protein, 32 aa, synthetic construct
  REGION 1..32: note = Description of Artificial Sequence: Synthetic polypeptide
  REGION 1..32: note = 2G4 VH HFR3
  MOD_RES 31: note = V or A
RFTISRDNSKNTLYLQMNSLRAEDTAVYYCXR

SEQ ID NO: 1583 - protein, 9 aa, synthetic construct
  REGION 1..9: note = Description of Artificial Sequence: Synthetic peptide
  REGION 1..9: note = 2G4 VH HCDR3
  MOD_RES 3: note = G, L, or S
RSXDWYFDV

SEQ ID NO: 1584 - protein, 11 aa, synthetic construct
  REGION 1..11: note = Description of Artificial Sequence: Synthetic peptide
  REGION 1..11: note = 2G4 VH HFR4
WGAGTTVTVSS

SEQ ID NO: 1585 - protein, 23 aa, synthetic construct
  REGION 1..23: note = Description of Artificial Sequence: Synthetic peptide
  REGION 1..23: note = 2G4 VL LFR1
EIVLTQSPGTLSLSPGERATLSC

SEQ ID NO: 1586 - protein, 12 aa, synthetic construct
  REGION 1..12: note = Description of Artificial Sequence: Synthetic peptide
  REGION 1..12: note = 2G4 VL LCDR1
  MOD_RES 2: note = V or A
  MOD_RES 4: note = S, W, L, or Y
  MOD_RES 5: note = S, F, or R
  MOD_RES 6: note = I, G, or M
  MOD_RES 7: note = S, V, N, I, T, or Q
  MOD_RES 8: note = S, F, R, P, L, D, or Q
  MOD_RES 9: note = S or T
RXSXXXXXXNLH

SEQ ID NO: 1587 - protein, 15 aa, synthetic construct
  REGION 1..15: note = Description of Artificial Sequence: Synthetic peptide
  REGION 1..15: note = 2G4 VL LFR2
  MOD_RES 12: note = P or L
WYQQKPGQSPRXLIY

SEQ ID NO: 1588 - skipped

SEQ ID NO: 1589 - protein, 32 aa, synthetic construct
  REGION 1..32: note = Description of Artificial Sequence: Synthetic polypeptide
  REGION 1..32: note = 2G4 VL LFR3
GVPVRFSGSGSGTDYTLTISRLEPEDFAVYYC

SEQ ID NO: 1590 - protein, 10 aa, synthetic construct
  REGION 1..10: note = Description of Artificial Sequence: Synthetic peptide
  REGION 1..10: note = 2G4 VL LCDR3
  MOD_RES 4: note = S, W, F, or H
  MOD_RES 9: note = Y or W
QQWXSYPLXT

SEQ ID NO: 1591 - protein, 10 aa, synthetic construct
  REGION 1..10: note = Description of Artificial Sequence: Synthetic peptide
  REGION 1..10: note = 2G4 VL LFR4
FGGGTKVEIK

1.-67. (canceled)

68. An antibody comprising:
a) means for binding human CD28;
b) means for binding human PD-L1; and
c) a dimeric Fc domain.

69. A nucleic acid composition encoding the antibody of claim 68.

70. A host cell comprising the nucleic acid composition of claim 69.

71. A method of making an antibody comprising culturing the host cell of claim 70 under conditions wherein the antibody is expressed and recovering the antibody.
